United States Patent Application Publication US 2007/0192889 A1 - sequence listing, part 14

SEQ ID NO: 29756 - DNA, 884 bp, Glycine max
  Clone ID: TF_GmC3662_86
actcctcattttgccagtgcctactaatagcaacagcaaccaaacagtgtctcatgatactgtttttgtttctgatgccccaacgtcgcagccttcctccgccgccacccgccgccgtcttagctctcccttctcataccttggaatcaaatcacgatgtcgaacccagacactcgatcattcaattggcactacacggaactcgatgacagagacctagagatccgaggtaggacactgtttttcgtcatcgtactcttctccattattcttcttgtcaccgttctcttcatctacacgcgctgggtttgccgctaccagggacgactccccaccaccgcgttctccgccgcagccgtccacgcgccgccgctagcgccgcctcagggactggaccccgcctccatcaagaaacttcccataatcctccaccacgcgcctgcggaccgcgacgaaagcgtgtgggacgaaacggagtgctgcatctgtctcggcgagttcagagacggtgagaaagttaaggttttgccggcgtgtgaccattattttcactgtgattgtgttgataagtggctcactcatcactctagttgccctctctgcagagcttctctcaaggttgaatcttccttccctaagattttgattcaggaaccaccccttagaattgacttccagttctagcttcttcttcttcttctttttttttttttacaagagacgatcgtatttatttgagtccattgagattattaagggcagaaaaactcttgtatttaatgcaaatatacatgcagaattggaatttgaaacaaatgattaatctgaaacgaagtttgtttctttttaaaaaaaaaaaaaaaaaaaaaaaaaaaaaaaaaaaa

SEQ ID NO: 29757 - DNA, 1603 bp, Glycine max
  Clone ID: TF_GmC1204_1
ctttttcctcagtggaacaaacctcagaagcagaaaaaggtcttctctctttctctctccttttccctcaagctcagaatctcccgatcgacagtcgacttttggcgcatattttacaaattaagaatcttgttaaaaagaagaaggatgtcaagcggagcaacacactggtgtcatgcatgcagatcgagcagattcggttcgagctttttcctctgtggaacaaacctcagaaaaagattttacaaattaaatattgtttaaaagaaagatgtcaagtggagcaacacactggtgttatgcatgcagacagccaattgtgcttgatgggagagatcctgtttgcccttactgtgatggaggatttgtgcaagaacttgacgagttgcgaggaattgcacccaaccataaccataccttttcgtcacagtcaggagactttcatcaaatgcctgacattttcgatgctatacatgcttttatggggcagagaggttctgaccagagatttgggcttatggacgccgttgataatttcatgaggcatagaatggccggaagaaactcaaactttgatgttagagggaggtctggttctctcccagttcctgaacagagttggggcgtttatagttccggtccttatttaatatttcacggtcaagttcctggattcaccttgtctgctggcagcccaagaggtggtcctaggcgtgttgattttggtgactactttatgggtcctggactggaagaacttattgagcaactcaccatgaatgatcagcgtggtccagccccagctgcacgatcttcaattgatgcaatgcctactattaagataacacaggcgcatcttcgctcggattcacactgtccagtttgtaaggaaaaatttgaattgggcactgaagccagagagatgccatgcaaccatatttaccattctgactgtattgttccttggttggttcagcataactcatgtcctgtttgccgtgttgagctgccacctcaaggacaggctagttcccgtggtactcgaagttggggaggaaggaatgccagcaacagcagcagcagtggcagcaatgatagctccaggggcagagagaacagccatcagaaccatggaaggagaaatccattttcatttttgtggccattccgctcgtctaactcgaacaataatcattattctgagactgggggaagcagctcttcaaccactcctgaccagaataatggaacaagttatagcggttggccctttgatcgctaaaagtatcctttcttctcctggataagtacaatttgctgtctaataatgcttgtaatttaaaatgccaaggaaagagtttattagtattgtattttaaacttaagctcatgtaaggaagatagaagtttcttaaaatctttgtacatgaaattgcctggtttgttgaatctctttgaaactttaatgccgcacctgtcattattcaatttgattgtatcttgctgcttagttggtttgtttggttcctttggggtcttggcagcaagcccaatatgctaaagactaaagagagtgaatttggtttgttaaatgaatctttta

SEQ ID NO: 29758 - DNA, 1326 bp, Glycine max
  Clone ID: TF_GmC4746_1
cggaggctcgccggcgaatggcggaggaaagggtgcctttggtgtctttggagagggtgccgttggtgtctttggatgatgggattgttggcgctagggattcttcttcttcatcatcgtcctctacttaccagaggtatgatattcagcaggttgcgaagtggattgagcagattctaccgttttctctcttgttgctgattgttttcatccgccagcatttgcaaggtttctttgtcacaatttgtatatcagctgtgatgttcaagtcaaatgaaattgttaagaagcagactgccctgaagggagatcggaaagtctctgttcttctcggtatctcttttgcctttatgctgcatgtgataagcatttactggtggtatcgaaatgatgatcttttatacccactggccatgcttccaccaaaaacaccgccacctttctggcatacaatattcatcattttggtgaatgatacattggtgcggcaagcagcaatggctttcaaatgtttgttgcttatttactacaaaaatggaagaggccataacttccgtcggcagggtcaaatgttaactctggtcgagtatactctgctgctgtatcgtgccttgttgccaacaccagtttggtaccgatttttcttgaacaaggattatggaagtctcttttcctcactgaccacaggattgtatctaactttcaagctaacatcagtagttgagaaggtccagtgcttcgtttctgccttaaaagcattatcaaaaaaggaagttcattatggggttcatgccacaacggaacaggtgaatgctgctggtgacatgtgtgctatatgccaggagaagatgcaggctcccatattgttgagctgtaaacacatgttctgtgaggagtgtgtatctgaatggtttgagagagaacgaacttgtccattatgcagggcattggtaaaaccagctgatctgcggaccttcggagatggatcaacaagtctattttttcagttgttttaagttcattttctttgacttgttgggtcatgtttttgagccaaaatcttcctggaaaatgtcaccatctatggtttggtaaaattttccattaatgaaattgagattgaaaaaagaataaagagatatttatatgtatggttaaagtatataagttcattctagagtaatgaggtcagatgtacaaagggatatagatagctggcattatactgaaatccgcgtggatctcttaacctgatattcgtcacgtcacacaatggaaacttttgtttataatgttacatttcaaattaaaaaccctcttcctcca

SEQ ID NO: 29759 - DNA, 959 bp, Glycine max
  unsure (1)..(959): unsure at all n locations
  Clone ID: TF_GmC1492_1
tttataacagcgctcgaacttcccctcctctctccctgcatcgccggacttaacagcgcctgctcttgttaaattcttctctaccttactactccctcactttgtgttagaatcatcatgggtttgcaaaaccaattaaacgacgtgtcgtcgggttcgattccgcttctggtgttggcgcagatagccacctgcgtcaactacctccgctccatgcttttcgcgcttttgcaaaccctaggtctcagccgattccactccgaccagatcgtcgacgagcgcttcctcgccgccgtcggatccggcctcgccggacttatcatgctctccgatcagctcaccctcagcagccaattcttccaccatcaccacggcaccgccgccggccacgaccacgaccacgaccaccacccctgcgtcgtgtgccaggccaccttcgaggacggcgaccaggtccgcatgctcccctgccgccacgtcttccaccgccgatgcttcgacggctggctccaccactacaagttcaactgcccactctgccgctctccgctcttctccgacgagcgcgtggcactcacggagcgccgcctcggccagcaactcatctcttggttctccctacactgatgcggccacgtttcgttttctgaacctccacttttacggttttacccctctcacgcgatcactttttacagagctgtacgcgggtttctttttctgtttttcttttccttgtttttaatattagttttttttttcccatagggtattaggctagatttatttatttttctctttttaacagtaatttttctgaaggtattttttgaagggttttcttccgtctgaaaatcctttttgagatgctgtaaattttggactctgtgtttatggtaataatcggagatagtagatgtaaagttttcatgaanacaaaaaaaaaacaccacnnnaag

SEQ ID NO: 29760 - DNA, 962 bp, Glycine max
  Clone ID: TF_GmC1492_2
cgacacgatacataacaccgctagctcttcaattcttctctccctcactactctctattcgttagtgttcttcaattcttcatcgcagacttagaatcatgggtttgcaaaaccaattaaacgacgtgtcgtcgggttcgattccgctgctggtcttggcgcagatagcgacctgcgtcaactacctccgctccatgcttttcgcgcttttgcaaacccttggtctgtgccgatttcactccgaccagatcgttgacgagcgcttcctcgccgccgtcggatccggcctcgccggactcatcatgctctccgatcagctaaccctcagcagccaattcttccaccaccaccacgccggcgccggcggccacgaccatcacccctgcgtcgtgtgccaggccaccttcgaggacggcgaccaggtccgcatgctcccctgccgccacgtcttccaccgccgctgcttcgacggctggctccaccactacaagtttaactgcccactctgccgctcaccgctcttctccgacgagcgcgtggccgtcacagagcgccgcctcggccagcaactcatctcttggttctctcttcactgatgcgaagccgtttcgttttctgaactcccacttttacggttttacccctttctcgcgaccactttttacagagctggacgtgggtttctttttctgttttttcttttcctttttactttccctcctttttttaatactaggggttttttttttaattttttcctccccgtgtagggtattaggctagatttcttttcttttttttaacagtaattttgctgaaggtattttttgaagggttttctaccgtctgaaaatcctttttgagatgctgtaaattttggactctatgtgttcatggcaataatcggagatagtagatgtaaagttttcataaaagaatattcggtttaactttttcctttt

SEQ ID NO: 29761 - DNA, 2444 bp, Glycine max
  Clone ID: TF_GmC1055_1
gtcttataagattaggttagaaattttatttgaaaatgaactccgataatcaacaacaatcggaggaaccaggaaatgcacaaaaatcactggagcattcggcagatattgctcaaccacaatccccaaatcaaacaactgctggaacatccactttgacggcagaggacacagaaaagccaaaatgtgcggtttgcggtgaggaaaatgccaaaatgcattacggtgttttggcatgcttgggttgcaagggcttcttccgtcgtgcactgaaaaagctgaatgaatatgaatgtttgcgcaacaacaattgcatcattgataaacaggaacgaaattcctgccgatcttgccgccttcaaaaatgtctcgatgttggaatggatccagcagccgtccgtcctgaccgtgatttcactggcaaacaacaattggcccgtcgattttcccattcaaaaggaagcagcaaccataaatcctctcagccaatgggaaaatgcagtggagagcgaaaaggaggaggaagggatgaggagaccgccggcaattgggcacatcgtcttccggtggaaatgcgcacaatggtgatgactttgcagaatattgaggcaaaggttgttcacggcgatacggcaaaagatgcagcagaaatttatccattgagggtcaacacaatccgcgagatcatcgaagagccaaccaaattgaggggaagacgcaccgaaatgcgctatgagccatacagaatggcaaaaaatgaggaattttcggtgattgtttatcgtcgactgattgccgccattgattgggtcgaattgttggccgaacgaatgggtgggctttcaattgaggatcgtattgcactggtcaaatcctgttttgggcccttgacgttgttcaaatgttcggcgaggacggcggttgtgaccagcaatgagaatttgctttgcctttgcaattttgcctatgttccacgcgaaatcaacaaagcatacaatgatgcatatcacctggaaaatggcctcgtggatcggctactcaatgaattggttgctccatttcggaaaattcatttagccgaggaggaaatagtttgtgtgtcggccataattgtgctgaatccaatggcaagggatttgtcagaaaatgcagccgaaaaagtttttcagcttcggaatcgagtctacacaacactttatcaaattatcaaagaatgtcgtccaaattgtaacacaaatgccacatttggaaatttgcttctctatttgccaattattacgtctctggccaatgcaatgagcgataatttgcgttttgcacaaacattttccgcacacggaggaagtcctttgctgaccagtctattcggctgttttcccgttgaaccatttgtggattcagaaatggcattggtcaaggcggttgaggggaaatgcattgctgaaaaacgagtgcaaacagaagaagagaagaaaatcaaagcgaaggagaagaaagaaacagtgttgcagaaacaaaaacggcgcaaatccgatgcaggcacccaaactgaatggaaatcacaattgaatcaaattacacgaaaacgtcgtctctgtccattggcctctgtggaagaaagcaatgaatttcacctgctgaaggccccatgctcttataccctcacggaaatgttcgacgatcgaatcaacaattgtggtgttgacgaaattgaggaggaggaagaagacaatatggaaaagaattatggaaacaatgcaacattgccatttgggacggaaaatcggcgattgattcggacaacaagctatcaacaaatgcacctccaacaaggaattgatgagcaacaagagttccggagaccgtcagccacttggacaaatgcaccttcacaaaaccaatcacaatcgcatggtcagcaacaaacacaaaattggccacagccacaacaacagcaatgttggccaaccaattcagcttcaacttcaaagggaattcccgcgatacttcctcctaccacccaaattcaaggcctttttctcaatgagccatcatcctcttcgcaacaacaatattttcaaggagcacgacaatatggcgatagccaatggactgtgccaccctcatcatccatgcaaatgcaatcaaattttacgccaatttatttgccctattcatcttcaatttcgccacattttgcctcaaatattcccacacaaattcattattctcaatcagcagcacaatatttccctcaacaatttgccccatctttttatccacctgaaccacaaagtcaacaacaattcacatatctcacggttaatcctcaacaacaatttttcaatgataataatactaataataattaacatttattccatttcaatatgattttgtgatattaaaatgtgatttaataaatgaataaatatttgaatttt

SEQ ID NO: 29762 - DNA, 3035 bp, Glycine max
  Clone ID: TF_GmC716_1
agcagaaacagacccacgcgtccggtgcattgtgtgtagcgggcaatggcggaacctctctcaaacaccgaactctcttcttccaaaaccctggacccaaccaacggtcacgattccacttcggaaccgcatcaaacggctccggaagacgctcagctcaatcgagaagacgacgttgttccaaccgcgaaacggaagagggacgacgacgtcgaagaccgttcgctgcatccgctgtggaagaccagcctatgctcttacttccggagccacaacggatcgtgcagccacggcggcgcttgccgatacgcgcacggcgaggaggagctccgcccccgccccgacaacacgtgggacccgacctccgagcgcgcgaagaaagcgctgaagaccgagtcggacgaaaagcgcgccgtctcggaggaagtgatgatgacggaggccgtcgtggacgacggtgatgacggttgtggcgcgaatcacgcgcttaacatatgcttggtgcatttgccgcggaaatggagctccgagaatttgaggacttttctctgcgaacagggcataccttttaagcatgctaagaaaaagaaaggcatgatgattggctttgagataccttttgaagatgaggaaacagttgaagagttcaaccatggaattagaaggaaaatcaattggcaacaaaacggtaaaggttgctaatgttcttcctgggtcattcgaaaagaaaagtaatgccattgtaaacatgagcagtgctggtttagcacggcacagggccaaatctatgcccatctcagaggcattccatcctgtaaaggctatggctgttgatctttttccacatactccacactgtgaattggttatgcttcttgagaggtaggtcataggtggaccagacaccaaagtctgggttaggtttcagattctcaaaaaacttactagaaatgctcgtaaagcttgtccaaatggtgtttctcttcctgaatggattctcaagtctagggaaataggtggtcttccgtgcaaactagagggtattattgcatcccctattgtaaatggataccgtaacaagtgtgagttttctgttggatattctctggaaggcaaagtgacagtaggtttcatgcttggaaacttcagggaaggtgtaacagcagttgaggaagcagtggactgcccaaacgtttcaacagttgcttgcaaatatgctacaatctttcaggaatttctacaggacagtgatttaccagtttggaacagatttaaaaatactggtttttggcgtcaattgacggttcgagaagggagaacaaatgggaatgttgttgatgctgaaacgtttagtggtgttgcagaggtcatgcttattgtgcagggagacaagacccctgattacttgaagcttatgatttgtatacctctttttttttaaagcgtcactcagaactctttgcctttggtgttgattataggtttctactgcaagctttgatgatgcaaaagtagctgctgagttcaagaggcttgctcaggcatttgttgccggagctacttcgcattgcccaatattaccccttacagctctggttgttcaggatcaccaaggaatatccaatgtggcaccagctgatgcaccactgcattcacttcccattcctaaagcagctggtgatcctgaggtggatgaaaataataatgccaaggatgtaagaatccatgatcatatcaacaatctccagttttctatatctccaacagcattttttcaggttaacactcttgctgctgagaagttgtactcacttgctggagattggtcatgcttaggtcctgacacactgctatttgatatatgctgtgggacaggaacaattggcctgacattagcacatcgagttggtgattggaattgaaatgaatgcttctgctgtatctgatgcgcataggaatgctgagattaatggcataaaaaacattaaatttatatgttcgaaggcagaggacgtaatgggatctctgttaagggaacacctgaatgtgactaaggaacaagttgatgatcctaatatctctggaaagggcaatgacagtcccgaggatagtgcatgcccagaacctgaaaatggtgaactagcatctcattgtccagaaaataacaatgcagaagttggaagtgaggttcagaagggtagcacttgtgaacaagctgatggtatctctgaacaggcagaggacgtgatgggatctctgttaagggatgatgcaaatatgcccaaggagcaaagtgattatccaaatatctctggaagtgggaatgacattcctgaggatagtaccttcccagtgcctgaaaatggtgaaactacatctcattcagaaagtaacaatgcagaagttggaggtgaggttcagaagggtagcacttctaaaaatgggaagacttcactgcaacagttcaaaaatgttgttgctattgttgatcctccacgtgctggacttcatccaactgtgatcaaagctttgagaactcatccaggcctgcggaggcttgtttacatatcctgtaatcctgaaactttggtggcaaatgctattgagctttgtacgccatcccccgtaaaaattgagaaaggaaataaagacaacagaggatggagaaacatgagcagtgctggtttagcacggcacagggccaagtctatgcccatctcagaggcattccatcccgtaaaggctatggctgttgatctttttccacatactccacactgtgaattggttatgcttcttgagaggtaggtcataggtggaccaaacaccaaagtctgggttaggtttattttatgtgctaggctctcaaatttcatttgtccaacattttttggcggcactgtaagtggtggtggatgttagtgcttattatattctgatcttacgcgcagtgaattatgttcaagcatgaccttcgatattcagttgtagcattattttcctttttgatgcatgtatcatgaagcattatctgc

SEQ ID NO: 29763 - DNA, 697 bp, Glycine max
  Clone ID: TF_GmC706754_1
atggaagggaaatatatttgtacgtattaaaagaaaaaagttcaagcagctaagaaatagactacgctataaacatattacaacttaagggcaatgagaaattgcttcctttgcaaagtatcaaatggtatcattgcaaaagtaccaaaaaaaagtagtatcattacaaagaatactttctctttggttgcttggattgggatcatcagacgtattatgtatgtaatattcaaaaatgaaaatgtcaaacttgacgggaagaaaaaaagaaagacacgacgacgaagacgactactgaccacattctccccaagaatcctgctatacatctcatatattgcggcaagcaagcaagcctcctattttgtattttgtattttttgacccttacttttcatgagaaaagtaattattgtttagctcgtggttgtccatgtttgtaattacacaatgaagaatattatgtaccaattacgtttaatccagcagcagactatggatcttatctttcgagcttcattgatcttggcttaggctgcgatacgacagctttctcttgttcagtaagtgcatggcggaaatggcatctatggccatatgggcacacaaccccagcaaggaccattctgcagacctcagttttgtagcgtgggtggcggatcactgggcgaagcttcccaataccatgagcaaaatg

SEQ ID NO: 29764 - DNA, 1778 bp, Glycine max
  Clone ID: TF_GmC119109_1
ctcgcgtccggtcggaacccctgctgagagaaagaaggcaagtcgctccgacctcgagccacggcaacgttgagcatagagtgacagagtgaagaggttccgtcatggcccccagaatccttctatgcggcgacgttttagggcgcctcaaccagctcttcaagcgcgtctcatcggtgaacaaatctgcaggtccattcgacgcgctcttgtgcgtgggtcagttcttccctgactcaccggagcagctcgaggacttcacgaaatacatcgaaggtggatctcactttcctcttccgacgtacttcatcggcgactacggcgtcgccgcccccaaacttctcttgcaagcttccaaggactccgccaaccaaggcttcaagatggacggcttcaaggtttgccacaacttgtattggctgaaaggcagtggcaaattccctctctttgggttatccgtggcctatttatctggtaggaagtcatccagtggtcagcagtttggaaattacactgaagatgatgttgatgcattacgcgcaattgccgaggaacctggagttgttgatttgttcttgactaacgaatggccgaatggggtcaccaatagagcagctgattcggacattcctgctggactctctgatggcagtgattcaactgtatcggaattagtacaagagatcaaaccacgttatcacattgcaggcaccaaaggcatttactatgcccgcgaaccatattccaatgttgatgctgtgcatgtcactcgtttcatagggcttgcgtctgttggaaatagagataagcagaaatttattcatgcaatctcccccacacccgcatccaccatgtcttcaactgagattgccatgaaaaccacaaataccaccttatcgccatacacattcaaggagaaaagaacttctccaatggattcagcaaagagatccagtgattctatctctgatcctcaatattggagatatgatgttgctcaaaagcgacaaaaacatgaagctggacatggtgataaattgtgtttcaaatttgtttcttctggctcttgtccacgaggagagaagtgcaattttcaacatgatacagatgcaagggagcagtgtatgagaggtgtttgttttgattttttgaataagggaaaatgtgaaaggggtccagattgcaactttaagcacagcttgcaggatgagggcaacaggcttccttctaggaggcctggatctggcaggtcaaaggaatgttggttttgcttgtcaagcccaaatgtggagtcacatttaatcataagcattggggaaaattactacttggcactggctaaaggtccacttgttgaagaccatgtactgattataccagtcgagcatatgcctagtaccttatccatgtcttctgaatctgaaatagagctctctaggtttcagaacagtctcaagagttactgcaagagccaagagaaggaagtcatcttttttgagtgggtctccgtacgtggcactcatgccaatattcaggccattcccattccatcttccaaagcaattatggccgagaaaattttcaatttagctgcacagaagttgggatttgaatttgtgactaagaaatttgatagcatttctgaaggaaggaagtttttgaaggcgcaaattgatggggattcaagcttgttctatgctcaaatccccagaggcacaattctgctgcatcatgttgaagagaaagagaaaattccttgtcaatttggtcgtgaggtc

SEQ ID NO: 29765 - DNA, 600 bp, Glycine max
  Clone ID: TF_GmC69531_1
cgcgtctggtttctctcccaacattctcatctgggtcttcccaatttcttgatttgatctttctccctctcagaaactggcctcagccaagagtttctcctttttccttttcacctgttcagcattgatatttggttatacattgcattaggttgaatatcagtgttttcaatttgataaaagatattgattctgtaagtccatttgctaagaatcaaatcaaaaaagtatcttctaaatttgatagaataggatcaaaatttcgccatgagtttctctgaccatattccatcctttatgatgtcaccgccgtcgttttccacagacacggatgccattgaagtgaggcttcaattcccaacgaacaacgaatcattggagccacattcaccacaggatcaacccccttcgttcaagagggcaaggacctgtgatagcagcctctccaatgcaatggcatgccctccaaggatgattcagcaccctgcacttaacaaaggaacgagccacattttcttcaagacccgtatttgtgcaaagttcagagctggcgcttgtaggaacggcgagaactgcaattttgcacatgggcttgaagac

SEQ ID NO: 29766 - DNA, 560 bp, Glycine max
  Clone ID: TF_uC-gmroLIB3258047g05a1
agtaccaaaagaattagtatcattacaaagaatactttctttttggttgcttggattgggatcatctgacgtattatgtatgtaacattcaaaaatcaaaatgacgggaagaaaaaagaaagacacgacgaggactactgacccaagaatcctgctcgatctacatctaatattgcggcaagcaagcctcctatatttgtattttggattttttgacccatacttttcatgagaaaagtaattattttttggccgggggttgtccatgtttgtaattacacaatgaagaatattatgtaccaattacgtttactcgatccagcagactatatatgggatcttatctttcgagcttaattgatctgggcttaggctgggatacgacagctttctcttgttcagtaagtgcatggcggaaatggcatttatggccatatgggcacacaaccccagcaaggaccattttgcagactttagttttgtagcgggggtggcggatcactgggcgaagctccccaataccatgagcaaattgggagtggtccccatatggacatgtt

SEQ ID NO: 29767 - DNA, 839 bp, Glycine max
  Clone ID: TF_GmC1146_1
tgctaagatatctctgatatatatagtttctgtgtctgatcccgggtttaattcgggttaagattgaaagcgtgagaatgccggtgaagaagtattactgcgattactgcgacaagctattccaagacacaccagcagatcggaaacgacacgttcagggcattcaacaccaccaagccaaagctcgctggtacgattccttcaaacaacaacaaatccctccgattcccaatcgacccctttgctttcacttcgtcaacacgggattttgccgctacggcgactcttgcaaatatctccatcccgttcccaacaacaatgtccagcagccgccaatcgtaaccacaccgtcgccttcaccagggagtgtggtaggagtgtcattcggcaatcttcccccctccctgcagcctccgcctgacggcgtatatctccaccttccctttctcgactggggatagatttgtaattctacccacttctcataactgcatctccgtgtctgtgttctgttcaatcatttcttaatttaaccttttagttcttctaattttcattgtgtggctggattctagtgatttcttatgacctagctccaccgtattatttggagttttcttatatctacccaacgcttaacttatgattaaatccaaaatctatcttattgtaatacatatgataatagactgcttgcttcagcaaggggaggcaaatggagtttatggacctattcatcgaaagcactcttagtttttgacaacatcggatctttttcatctttattgctaaagtgaattttaatatatgttctgaaaaaatatgtttaattaatcatg

SEQ ID NO: 29768 - DNA, 547 bp, Glycine max
  unsure (1)..(547): unsure at all n locations
  Clone ID: TF_GmC1146_2
ctcgagccgttgaaagcgtgagaatgccggtgaagaagtattacctgcgattactgcgacaagctattccaagacacaccagcagatcggaaacgacacgttcagggcattcaacaccaccaagccaaagctcgctggtacgattccttcaaacaacaacaaatccctccgattcccaatcgacccctttgctttcacttcgtcaacacgggattttgccgctacggcgactcttgcaaatatctccatcccgttcccaacaacaatgtccagcagccgccaatcgtaaccacaccgtcgccttcaccagcagcaaggggaggcaaatggagtttatggacctattcatcgaaagcactcttagtttttgtcaacatcttatctttttcatctttatttctaagttgaattttaatatatttttgtagaaaatatgtttaattaatcatgatacccttcgagtgaatgacatcttgtattcaactaagtttatagcacattttcactgtcaggttntacgttagtatctagagaagttatcgaacaa

SEQ ID NO: 29769 - DNA, 510 bp, Glycine max
  Clone ID: TF_GmC31054_2
acgaagctcgaattcggctgacacgtgacgttcattctgtctgttggaactgttggccttttagggttagggtttcggtttgtggatctattgttgcctctgcgatggatcgcaagaggggaaggcctgaagctgccttcaatttcaatggcggcgccaagaaatcgaggcctgcacctccggctgtccatttggtgaaggatgccacttcctgcattatgttcctggtggctttaaagctgtctctcaactgatcaatgttggtagcaatcctgttactcctcaagttgggagaaaccctgttccaccatccttccccgatggatcttctcctccagttgttaaaacccgattgtgcaacaagtttaatacagctgaaggttgcaaatttggtgacaaatgtcactttgcccatggtgagtgggagcttggcaggcctacagccccatcatatgaagatccccgtgttttgggacaaatgccaagcagcagggtaggtgggcgagttga

SEQ ID NO: 29770 - DNA, 304 bp, Glycine max
  unsure (1)..(304): unsure at all n locations
  Clone ID: TF_18691395
tcncgctggtttaggggggttttcgtggccatgtgctgtgttttttggtgcctctggctgtgcctttggtgttggatgtcccttcttgtgttgtgttggaggtggcttctccggtgtctctcagctggtcggtggtggtggggatcctgttattggtcacgttggtgngtgccctgtttttttttctttccggggtgggtcttctgctgctgttgttaagtctcgcttgtgcattgagtttcacgcgggcggaggttgcaaatttggtggctcttgttcctttgcccatggtgagtgggtgctg

SEQ ID NO: 29771 - DNA, 554 bp, Glycine max
  Clone ID: TF_LIB4392-022-R1-K1-A7
gtgttgttcgtgatgatttagttgttgttgatgaggatgatgatgacggtgttgctgttcgtgatgatttagttgttgttgatgaggatgatgatgatgatggtgttgttcgtaatgatgtagtagttgttgttgatgttgatggttggaatggtagtgatgaggggtgtgattggattgagaatgagaatgtgaatgagagtgtttttgataaggtgggagtggaatataaagatgagaggagcagcggtaaagctcaacagtacccgttgaggccagaggctgaagactgtgcattttatctcaaaactgggacttgcaaatttggattcaattgcaagttcaatcacccgcttaggaggaaaaacctggctaaaaacgagaatgcgggagaaagagaagagcaggaagaaagatcaggccagacggaatgcaagtattatttaaggtctggggggtgtaagttcggaaaggcttgcaagtttaatcacacaagaggaaagagttcatcagcatcctctactgcagagcttaacttccttggcctgcctatt

SEQ ID NO: 29772 - DNA, 1298 bp, Glycine max
  Clone ID: TF_GmC1136_3
gagggagttaagggtgagaggagcagtggtagagctcaacaataccctttgaggccagaggctgaagactgtgcattttatctcaaaactgggacttgcaaatttggattcaattgcaaattcaatcatccgcttaggaggaaaaaccaggctaaaaaagagaatgcgggagaaagagaagaacaggcagaaagatcaggccagatggaatgcaagtattatttaaggtctggggggtgtaagttcggaaaggcttgtaagtttaatcacacaagaggaaagagttcatcagcatccgctaccgagcttaacttccttggcctgcctattcgtgtgggagagaaagagtgcctctattacgcgcactggctcttgtaagtttggagcaaactgcaggtttaatcatcccgatcctacaactgttggaggaggtgattctccttctggttatggtaatggaagttctatttcgttacaaggtgtatcacaatcatctatatcctcatggtcttctactagaccattaaatgaatctgctccttttgtgccggtgatactttcacctaatccaggggtttctccccaaagttctgaatggaatggataccaggcacctgtctatctctctgagaggagtctgcatccaccttcaacatatgtcatgaacaacccagctatggaatcaaatgtttatatgcaccatcaaaaacaaatgcaggttgaagagtttccagaaaggcctggtgaacccgaatgcagctatttcttaaaaactggggattgcaagtttaaatctaattgtaaatttcatcatccaaagaatcggattgcaagattacctccatgcaacctcagtgacaagggtctacctttgagaccggagcagactgtttgcacatattaccgccgttatggaatttgcaaatttggaccagcttgtaagttcgatcacccaccaccctcaactatggctggacttgatcaacaatcctcgtatacaaactcagctggtgttgatgtggctgaaaatggagatgccgatgatgggaatcagcagtctgtgtaaaacactgactttgagtatgcacatcacccataatttgtaattttcttatccaaaaacatgataaattatgtaatttcactagttatgcccaatgtggcacaagccttgcagaatagcattatatacctaatagaatttttattactgtaacatgtagattatttttttgcttctggtttgatttctttcacttggatcattattagattatgattttgtgctggtgtaaacc

SEQ ID NO: 29773 - DNA, 444 bp, Glycine max
  unsure (1)..(444): unsure at all n locations
  Clone ID: TF_uC-gmroLIB3259P212a05a1
gcttncntttttttttttttttttctgccttcgcccaaaagaactttggaacattacctaagtactgcataactctaacatccatacttaatctcagggccatatagtagcctcgcacaccttcaacagcgatattgatcataataaccataccctggctaatacaaatggaaaaacaaactcctactcccgacttgcgcttttcaacagctccatgtgcgaagggtcatctctctgcaaaggagcaagatccttgtggaaaattctgacacagctgggtcttgaacttgcttgcagggggggcaggggctccaggaacacctggggtggattttggtggggcaaacatggacacgggctaagagaaatgttttaccatgttgctagctctcttaatgtggacaaaaaaagcctcgagttcaatggttctaatattgggatcgg

SEQ ID NO: 29774 - DNA, 469 bp, Glycine max
  Clone ID: TF_GmC766_3
gtgagtggaatgagaagtgaatggaaaattgaatttccatgatcagtggggtggttagaacttagaagagaagagaactagagaagtgattttttgcaaagacaaagcgagggtttctattgttttgttgagaattcaattcaaagcttttgatttgatgatcataacataacacaatgagagatatttgtaggaacttccagcgaggcagctgtcaatatggagaaaggtgtagatatttacatgttcagcaacagcgaaaacctaatgttaatgggtttggaggtcagagcagttcttatcaacagcaaaatacaaatccctttggatttggctctggctcacaacaacagcagcagcagaagggtaatccttttggttttggcaagcagaacagctcccagttaaatggtgggcctcattctgagcataaacccaaccaatacaagccttttgaaaacaaatggaa

SEQ ID NO: 29775 - DNA, 490 bp, Glycine max
  Clone ID: TF_jC-gmXLIB3563P064bf02d1
ctaaccattccctgtcagaaacagcaccggaatcaggagttctgcctctcgatttccttttaaagctgccattccaatcctcattaggagttctatgctttctttcatctcgctgttttcttctacctgaatgaccgcaatttaactgatccatctccctagatcttgaccttcttctagagtggcacgttctgtcagaatctgtttttgacaaactcatatttccttgctccattgaagtctcataatcatcagaataaccaaataaagcgatcattttttttacccaaaatttcgggggaggtttgtcagaatcggcccattcatagtctccgccgggattacgaaaacagtggataaaattgcatgttgttccatgagaacaagtcttgaaacctgatttcatatactcgccacatatggcaaccttccatcgtgtcaagttaacaaattgacaacttacctgtttcccagcaaagtagcgaccatt

SEQ ID NO: 29776 - DNA, 812 bp, Glycine max
  unsure (1)..(812): unsure at all n locations
  Clone ID: TF_LIB4164-024-Q1-K1-A7
ccacgccgtccggaaaaaaattatagtaaatgcttttgaactacactataaattgttaggttgaaaaattattggacctccaaaacaacttatggggaaagcaagtttgtatgattttttctcttgcccaaaccatgtaatcagcatatgtcactattcataacactttttcctgatgttatggcagtattatcaaaggtctgggggttgtaaatttggtaaatcttgtaaatataaccacacaagaggaaaaatttcaacagcaccagcaccacttttggaacttaactttcttggcctgcctattcgtccgggggaaagagagtgcccctattacatgcgcactggctcttgcaagtttggagcaaactgcaagttcaaccatcctgatcctacagctgttggaggaggaggaggtaatcctccttcagggtatggtaatggagggtctatttcattacaaggtgtatcacaaacatctgtaccctcctggtcttctccaagaacattaaatgaagcatctccttttgtgccaatgatgctttcacctactcaaggagtttctacccaaagttctgattggaatggatatcaggtaaacagagtcaatgccaataaccatatatggcaaggaacaatttattatataattagtacaagataacatttagtcttccagttttctatcatgcaacgttaatgctctcttcacctagtgggataaggctttgttgnntgtgaaatgttaatgctctctgttgctgcacatacattggcaatgccatgtcctcatttttccttttgcaactgca

SEQ ID NO: 29777 - DNA, 1651 bp, Glycine max
  Clone ID: TF_GmC1136_1
gggcgtgggcggtgatggtgatggtgatggtgatggtgatggtgatggtgatgatgatgttgatggtgatgttggtggtgatgatgaagtggagaagaaggaagggagaaacagtggtggtactcaccactaccctttgagatctgaagatgaggagtgtgcattttggatgtgattggggtatggatggtgatgttgatgtgagagggacagtcaccgtgagaagtggagaagagaggctgtaagaagggaggaacagtggtggaactcaacactaccctttgaggcctgaagctgaggattgtgcattttatatgaaaactgggaattgcaagtttgggtttaattgcaagttcaatcaccccattaggaggaaaactcaggctgttaaagagaaggcaggagaaagagaagaaaccacagaaagatcaggcatgacagaatgcaagtattatcaaaggtctgggggttgtaagtttggtaaatcttgtaaatataaccacacaagaggaaaaatttcaacagcaccatgtcagcaccacttttggaacttaactttcttggcctgcctattcgtcgggggaaagagactactacatgagtttttcaatacaaagtgtatcactattgatctgttccctgaactggtctgtctacaagaacattaaatgttcttaaaacctttggatgtgcaattgatgctttcttatctacttcaaggtacgtttatacgggctaaatttctgattggaggataccacagtcaggacatctgtctatttacctgagaggagcattcatcccaccttctacatctgtcatgaacaacccagcaattgatacaaatgtttacatgcaccatcaaaagcagatgcctgttgatgagtttccagaaaggcctggtgaacctgaatgcagctgcttcttaaaaactggggattgcaagttcaaatctaattgtaaatttcaccatcccaagaatcgggttacaagattacctccatgcaacctcagtgacaagggtctacctttgagacctgaccaaagtgtctgctcacattacagtcgctatggaatttgcaaatttggaccagcttgtaagtttgaccacccgataaacttgcagcccgtgatgattcctggacttgagcaacaatcctactcaaactcagctagtgctggggtggctgggataggtggaagtacaggcgtaactgatgcgacaattcagcaatctgtgtaaacatgtttgtctgaggatcttcttgctttgaggatgcatatcaccccaaattgttttcttcttaaacatgataaatttattttacttttcctagccctgtccaatgcagcacaagctttgcaaggaatagctgacatataatatatatcaaacagtttttatgtatttattacaagtaacatctgcatctgtagattatctcttgtttatggtttgttttctgtcagttggatcagtattggataataattagactgttttgtttcactagttatgctaatgtggcacaagccttacagaatagcaatatatacggctaatagaagttttattacagtaacatgtagattatttttttgcttctggtgtgatttctttcacttggatcattattaaaaaaaaaaaaaa

SEQ ID NO: 29778 - DNA, 419 bp, Glycine max
  Clone ID: TF_LIB3242-241-Q1-J1-A6
ctcctggcgggcccggcggctctcactatccaggtccctggtgctgaaccgcctgcgtccagttgccagcgggggtgggaaagcccaaccgggctccccttggtggcggagcaaaggctaccgctgcatcggaggggtcctctacaaagtatctgccaacaagctctccaagaccttcggccatcccagtgatgcgggcagcaggcccctcctgcgcacaggccggctggatcctgcatgcagctgtagccgttccctggccagccgggcagtgcagcgcagcctggccatcatccggcaggcgcggcagcgcacggagaagaggaaggagtactgcatgtactacaaccgcttcggcaggtgcaaccgtggcgagcgctgcccctacatgcacgatcccgagaaggtggccgtgtgca

SEQ ID NO: 29779 - DNA, 474 bp, Glycine max
  Clone ID: TF_GmC74310_4
attaaacctacacactctcttttacagtgaaagtgtgagaaaaacccgtgtctctctctcgggttcgcaacgaggagacaacaccggagctctccgatcttccagaacattctagagtggcaacgggattcattcttcgcttcaaactttaaacacccaaacactaacccatctccatggacttgtacggtcggagccctgccagaaatggacccaacccggtgaaccaacccgaatggagctcaccgggcaccgacactgctctcgaagaatcgatgtggcatttgacgctgggtggtggcgaatcttacccggagcgatccggcgtgccgaattgtgtgtattacatgcgaactggtgtgtgtggatatggtggcaggtgtcgttacaatcaccctcgtgatcgtgctgcggttgctgcagcagtaagagctacaggggactacccagaacgggtgggggaacctccgtgtc

SEQ ID NO: 29780 - DNA, 1013 bp, Glycine max
  Clone ID: TF_GmC568_1
ggtaccctttataaattcctgattggacccacgcgtccggggaaccactaaacgatgatcccaaacgttcaaatccctacctgggacgcggacggaggaggagcactctccccgtcgatctcttccaatgctgacacgtgctcattattctcctccgaccatttccgaatgttccagttcaaggtgcggaactgtccacgtggcaggtcccacgactggaccgagtgtccctacgcccaccccgccgagaaggctcgccgccgtgacccccgcaagtaccactactcaggcacctcctgccccgattaccggaaggggaactgcaagaggggcgacacgtgtcagttcgcgcacggcgtcttcgaatgctggctccacccttctcgctaccggacccagctctgcaaagacggaacaaattgccgccgcagagtgtgcttcttcgcccacaccagcgaccaactccgcgtcgtgacggattcatcgtcgtcgtcgtttgtttcctctcccacttcggtgctcattaactcttcgttctccgattcttcgccgtacagcttcgtccgcggaatagttaaactggatgaggaagggtcgtattcgggtctgacccgttgcgtgttcgggtcgccacgtggcgggtttatgagtgtgaatgggtgcgaggaggagcctgcgatggagagggtggaatcggggagagacattagagcgaggatatatgcgaagcttagtagggagaattccattggatgagtatcggaactcgtgaaatgaatggattccgtggcctttcatttgggtctgtctgtttgtctctgtacaatatataatgcaattcaataaaataaaactatatgtacatagttgagaaggtagagaccgttttgctctctgtgttttgttttttaccttagttcctggctgcccaaaattgggtagcatttgattgtatcaattgttaattttggacttcattcaagaatcatgtttttcttattatttccaaaaaa

SEQ ID NO: 29781 - DNA, 472 bp, Glycine max
  Clone ID: TF_GmC568_3
cccacgcgtccgtacggctgcgagaagacgacagaagggggatgatcccaaacgttcaaatccctacctgggacgcggacggaggaggagcactctccccgtcgatctcttccaatgctgacacgtgctcattattctcctccgaccatttccgaatgttccagttcaaggtgcggaactgtccacgtggcaggtcccacgactggaccgagtgtccctacgcccaccccgccgagaaggctcgccgccgtgacccccgcaagtaccactactcaggcacctcctgccccgattaccggaaggggaactgcaagaggggcgacacgtgtcagttcgcgcacggcgtcttcgaatgctggctccacccttctcgctaccggacccagctctgcaaagacagaacaaattgccgccgcagagtgtgcttcttcgcccacaccagcgaccaactccgcgtcgtgacggattcatc

SEQ ID NO: 29782 - DNA, 662 bp, Glycine max
  Clone ID: TF_GmC1146_3
ctaagatatctctgatatatatagtttctgtgtctgatcccgtttttaattcgggttaagattgaaagcgtgagaatgccggtgaagaagtattactgcgattactgcgacaagctattccaagacacaccagcagatcggaaacgacacgttcagggcattcaacaccaccaagccaaagctcgctgggattttgccgctacggcgactcttgcaaatatctccatcccgttcccaacaacaatgtccagcagccgccaatcgtaaccacaccgtcgccttcaccagggagtgtggtaggagtgtcattcggcaatcttcccccctccctgcagcctccgcctgacggcgtatatctccaccttccctttctcgactggggatagatttgtaattctacccacttctcataactgcatctccgtgtctgtgttctgttcaatcatttcttaatttaaccttttagttcttctaattttcattgtgtggctggattctagtgatttcttatgacctagctccaccgtattatttggagttttcttatatctacccaacgcttaacttatgattaaatccaaaatctatcttattgtaatacagtatgataatagactgctgagtttgctttaacacatacatttataagcatttttcacctg

SEQ ID NO: 29783 - DNA, 2326 bp, Glycine max
  Clone ID: TF_GmC286_1
accgtccggaatcaaatgttccgaagattgcagaaccacagccaggaaactctaagctaatctgacgccaactttcatccaattggaatattattaaatctctttttaagatttcacattttgattcttctcaattttatctgcgattctcgcttggtacctttgttttgtttttaatattttagttttcctggatttttattttttttattttttattgtttttagtctttggtcaattttcactgtctcctgatgatcattttaccatgtggggtgagttaatttgagattgttgtgcgctgatttcttcttaaaggctcaaagggttttctgggtttgatcgaacaagcaaaaaaaaagagtcttctgttatcctttcaacgctaccagatgccggaaaacaggcaggttctgaggaatgctgattctagtgacaacattgaagcaattcggcgtttgaaaatcaatgataattgggatagagatgctgcagctcaatctacccaatatccagatcgacccggtgaacctgagtgcttgtattatttgaggactggagcgtgtggttatgggagtaactgtcgctaccatcaccctgctcatatttcaattggtactcattatggtgaagaactccctcagagggcagggcaacctgattgcgagtattttcttaagactgggatgtgcaagtatggatcaacatgtaaatatcatcatccaaaggacaggcgaggtgctgctcccgtgtcattcaatactttaggccttcccatgcgtcaggaagaaaaatcatgtccctattacatgagaactgggtcttgtaagtttggtgttgcatgcaagtttcatcatccacagcatgcttcccttggagcatacccattggctggatctcctactcctacctcaacaattattcctacatcaggtttaccatatgctggagggtttcctgcatggtcagcagtaccaagaatgtcgtatttatctggacaaggacttcaatcttatgtgcctccttttctgtcttcttcgcaaggtgttatacctgtgcagagctggaacaactacatgggaaatatgaaccctgcaatgccgaacggttttcttggatctaatcttgtttatgactacatgaatctgggcgagtcactctttggtgggcaggcaataaattctgctctcccaaataggcctgatcaaccagaatgcagatactttatgagcactgggacctgcaaatatggatctgattgcaagttccaccacccaaaggaaagaatgtctcaatcattgataaatccactcggccttcctgtgcgacctgggcaagctgtatgctcttattacagaatctacggaatgtgtaagtttggcccaacatgcaaatttgatcatccagttttgactatccctcagaactatggcttgacctcacctgctatgaatgtacttgatactcctctcaccagggggttatcaaatgtacaaccacctgagacatctccttctaaattaagtgacaagaagcttcagcattctgatgcaaaagctgctacagaagattcatccaaacaagatgatactacattgaattccttcccggcttccgcagagcctttacacaactaaactacttgaagtttgattcttttttcttttggatattttgttttcccccacattttcaggagaagtatatcatacataccatctattcccccccttttcacctgcaattctgtggagttggatagtttgttcagagatttttgtgacaaccactagcttgtggggaatggaaggcattttttgtgttgaataaaatgcaggtagaaactacttgaagtttgaattttttttctttcttttggacattttatttttccccacattttcaggagaagtatataatacataccatctattccccccttttcacctgcaattctgtggagttggatagtttgttcaaaggttgttgtgtcaaccactagcttgtggggaatggaaggcattttttgtggtgaataaagtgcaggtagaaagattttccaggtgcagatttttctggttattggttctccattgttgtttggcatgattcatggtttaaatggctccgatcatcgtttaatgatgatggctttgtgttgttttgctagggaatgtttgatattagatggtttttattcaacgatttttgtttcatttatgatatcatgcctttctttttatggtacgatgattctgatttggagaattctgatgattcacacaatgtattgtgagagacctatgacgattttttttggaaacat

SEQ ID NO: 29784 - DNA, 2290 bp, Glycine max
  Clone ID: TF_GmC1128_1
cggaaagagagagagaagctagagagagaaagagaccaaactaattagtgtagaagaaacagggagtctgtgtgggtgtgggtgtgggtgtgagagagagagggagagagaaagcagagaaaatccgaagcagttttctcacactttttgatcggaacctctcattccgcgttcagattgcgtcccccatttggtccttacaatggagcggtacgggcgggccagcgaagggtcgcagtctgatccgtcgccggaatggaccgtggccgccgacgccgacgccggcctcgaagagtcgtcgtggcaactcggattacccggtgctgaatcttaccctatgcgtcccgatgaggcggattgtatctactatttgagaacgggattttgcggttacggcacacgctgtcgtttcaaccatcctcgtgaccgtgccgcggttattggagctgcgccgaggactggaggagagtttccagagcgcgtgggacagcctgtgtgccagtactatatgaggacgggatcatgcaaatttggtgcgtcctgcaagtaccaccatcctaggcaggtgccaggcactgctacccctgtgccactaaattattatggatacccattgcgagtgggtcagaaagagtgttcctattacgtgaaaactggacagtgcaagtttggtgcaacttgtaaattccatcatccacagcctgcaggcgtccaagttctagcaccatcaccagttcctccagtttcacctctgcctgtacctgtaccttcaccaatgtatccaactgtacatcccccatctggtccttcacaacaacaatatggtgtacttgttgcaaggccacctatgctacctggctcagtagtccagggtccctatgggcctatggtagtgtcccctaccatggtccctttttcaggctggagtccttatcaggctcctgccacaaaccctctacttccatccagcactacatctaatgttggttctacacagctttatgggataacccagctaccttcatcagcagctacttatactggaccttatcaaccttctggttcttcaattggtccttcaggtgctagtcagaaggagcatccatttccagaaaggcctgatcaaccagaatgtcatcattacatgaaaacaggggactgtaaatttggcccgttgtgtagatatcatcatccaccagacaagagtgcaccaaaagcaaatgtaacccttagtcccgtgggtcttccattgcgtccgggggcaccaccttgcactcattatacccagcgtggagtttgcaagtttggttctgcatgcaaatttgatcatcctatgggatcactgagttatagtccatctgcctcttccctagctgatatgccagttgcaccctatcctgtgggttcctcaattggtactcttgccctgtcatctttgtcatcagagttgcggcctgaacttggtgcaggatccaacaaggagtctgttgcatcgagaatgtcttcaatgagcacatcgactggatcggttggcttgaccttgtcaagcgttggtcccatttctcactcaagcacccaaccatctgctcagagttccagttctccggaaactaccagtgctaccacaagtagcactgtatctcacacctcaagctaagcaatgtgaatgaattcctcattattactcctttttatgtcaatttttcaaccggccatcattactcgaggttctcaaataggttttatttttcaattatcccagctccacattcaggtctatagcacacattgcaccaattgtctgtgttcatataatctttttgtggccatccctttgatcttgaataaaccatggccaaccttgagaattttagcaacccatacacgcaccttgcttttgaataacttcaaaagaatctgcaactccattatgcacatgtccattcacatctccaattttcgtagtttgttgtgcttatctatgcttcaatctttttttatatgagaaaatttctgcccggagtttcattgacagtgtaatctctcttcacctgaaccctttttttgcaagtgggaataatctctagttctgcctggaaggtcctgtttgccactgttcccaacttatctaaggtttgaagtgaagagaagtaatcaggagactacaatgaggcttcacattgctatcttttgtgattttagatacacggtgatgttgtgacaagtaaaatgcttgacttggtactttattacacaatacatatatgaagaaacacatttaaattaacac

SEQ ID NO: 29785 - DNA, 196 bp, Glycine max
  Clone ID: TF_10236743
atacaagaccgaaatgtgcaagaattgggaattgagaggagcctgcaagtttggagacaagtgctgctttgcccacggtagacatgagcttaaaggaaaggcattgacccatgtcaaatataagaccaagcgctgctagcaataccatcattccggatactgcccttatggtctaagatgccagtatcttcataaa

SEQ ID NO: 29786 - DNA, 1195 bp, Glycine max
  Clone ID: TF_GmC16887_2
gtttagtttcgaaccctttccttttccttccttctccgcctcaccaccctaacccaaccctctctctttctctctccaaaatctctctccctcccaccgttatttagggtttggcagatctcgatccgtcacaatggacgttcgcaagcgcggaaggcccgacgtcaaccttaacggcgccgttaagaagaccaagcaagaattggagtccttatcaagtggtgtaggaagcaaatcgaagccatgtaccaagtttttcagtactgctggctgcccatttggtgagggctgccacttcttacattatgttccaggtggttacaatgttgttgcccatatgatgaatttaaaacccgcggctcctccaccaagaaccgttgctgcaccaccacccatcccgaatggttctgctccatctgctgttaaaacccgcatatgtaacaaattcaatactgccgaaggatgcaaatttggtgacaagtgccattttgcccatggtgaatgggaacttggcaaacctattgctccatcaattgatgatcatcatcatcatcgtcctttgggacctccagcaggtggtcgtatggctggtcgaattgagcctcctcccgctatggctggtagctttggtgccatttctaccgccaagatcagtgtagaagcttccctggctggagctatcattgggaagggtggtgtgaactcgaagcagatctgtcgccaaacaggagccaaactttcaattcgagagcacgaatccgatccaaatcttagaaacattgaactcgagggaacttttgaacagattaaggaagcaagtaacatggtaaaagatttacttttgaccgtgtcaatgtctgccccaccaaaatccaccccaggtgttcctggtgcccctgccccccctggaagcaacttcaagaccaagctgtgtgagaattttgcaaaaggatcttgcacctttggagagagatgtcactttgcacatggagctgctgaattgcgcaagtcgggagtatgattttgtttttccatttgtattagccaggctattattattatcatcattattgttgttgaagctgtgcattgctacttaatggtactgaaattaattcttgatgttatagttttgcagtactaagttatttttcaaaactacttttttgcgattgcaaatactgttctttttctt

SEQ ID NO: 29787 - DNA, 801 bp, Glycine max
  Clone ID: TF_GmC286_2
ctacatgggaaatatgaaccttgcaatgccgaacggttttcttggatctaatcttgtttatgactacatgaatctgggcgagccactttttggtgggcaggcaatcaattcagctctcccgaatagaccagatcaaccagaatgtagatactttatgagcactgggacctgcaaatatggatctgattgcaagttccaccacccaaaggaaagaatatctcaatcattaataaatccacttggccttcctgtgagacctgggcaagctgtatgctcttattacagaatctatggaatgtgcaagtttggcccaacatgcaaatttgatcatccagttttgactatccctcagaactatggcttgacctcacctgctatgaatgtacttgatactcctctcaccagggggttatcaaatgtacaaccacctgagacatctccttctaaattatcaagtgacaacaagcttcagcattctgatgcaaaagctgctacagaagattcatccaaacaagatgatactacatcaaattccttcccggcttctgcagagccattacacgactaaactacttgaagtttgaattttttttctttcttttggacattttatttttccccacattttcaggagaagtatataatacataccatctattccccccttttcacctgcaattctgtggagttggatagtttgttcagaggttgttgtgacaaccactagcttgtggggaatggaaggcattttttgtggtgaataaagtgcaggtagaaagattatgacccttcacgtatttc

SEQ ID NO: 29788 - DNA, 992 bp, Glycine max
  Clone ID: TF_GmC859_1
accccttccttaccctcgggcaataagtcgcgcagaggtcctacaagggaaggcattgtaagaagttttacacggaggaagggtgcccctatggagatagttgcacctttcttcacgatgagcaatcgaagaatcgcgagagtgttgctataagtttgggccctggtggttacggtggcggcggcggcggcggcggcggtgttggtggtggtgccagtggtggtaatggtggtgctaatgctgctgggaatgggcctaattcgaagccctctaattggaaaaccaggatttgcaataagtgggagatgacagggtattgcccctttggcaataagtgtcattttgctcatggtgccacagaattgcacagatatggaagcgggcttatagagggagaaaatttcgatgctgcttctgcagttgctggtgacacaaataagggagtgccttcaaaagcttctgccgataatgtggttgcagcagttactcttgtcgctcattctgatgtgtatcatattggagtcccttcacaaaggccttcttccatggtgattcagaggccaggacagagagcacatcagaagtggaaaggtccagataaaatcagtaggatatatggtgattggattgatgacatcgaatagagttttaatcccattcatggaaacgactgatgagggcttatgtactatcaaaacgcaatatttttcattcacatgttaatttttcttaagatccttaacttccaacgggaatagcattttagatcgtttcattgataactgttttgtaggtttatgcttggtggtgtattcaccttccttaatacgttgattctctggtgtctaaatgtagcaacatcttcccttgtatttgcatccgatagtatcccataatttttattttagcaaaaaaaaaaacattaggattgttttgctaccgcgtaggatctggttgtcctgatgcaatgaaaacccctttacgattttctg

SEQ ID NO: 29789 - DNA, 1432 bp, Glycine max
  Clone ID: TF_GmC1810_2
atcctttaccatcccggattctccctgccactacaaattcccaacttcgcaaaccctaggcagcagcagcagcagcaacaacaacagcaacgaagaattcgaagagaaatcaaatcgaatctcatttgatctgtgtgtggttgcggcggcggcaatggcggagcacttggcatcgatattcgggacggagaaggacagggtgaactgcccgttctacttcaagatcggcgcgtgcaggcacggcgaccggtgctcgcgtctccacacgaagccgagcataagccccactattctcctctccaacatgtaccagcgccctgacatgatcacccccggcgtcgacgcccacggccaccccatcgaccctcgcaaaatccaggaccacttcgaggagttctacgaagacctcttcgacgagctctccaagtacggtgatatcgaaagcctcaatgtctgcgacaacctcgccgaccacatggtggggaatgtgtacgttcagttcagagaggaggagcatgccgctaatgctgttaggaacctcactggaaggttttatgcaggtcggccaattattgttgatttttcgccggtgacggatttccgagaagctacttgcaggcagtatgaggagaatacttgcaaccgtggtggttattgcaacttcatgcacttgaagagaattagcagggaattgaggcgtcagttgtttgggaagtcccatggaaggcacagcagaagcagaagcaggagtccttacaggcatcgaagccatgaggagcggtctcatcgaagtcatagcagaaagtatgatgacagggaccaccatcatgagagtcgcagcaggagacacaggagcacaagtcctagacataggagaggacgaagtcgcagccgaagtcctggagggaggaggcaccatagtccggttagagatggcagtgaggaggccattgagcatggacagggaatgaacgagcagtttcaactctttgataggggtttttgttttcaatgtttaattaatttttcctcttggaatatgaagtagcatgatcttacgctgttatgagttttgcaggttcaggtatccctgcttcttgtaaaaaacgagccctttagttaattgcagtttaccgtggaatttgtgtacaggttcatggcttgctctttgaggatgttttaacggatctttcagctggcaagtaatcgtgtttgtaggaaaagccttggctggtttacttgctgcatttgtgcaggctctgaggaagatggcttcatttttataattttatttagttttctttttcctggcatattaggattttttagtgtgtaaaccttcgaacccaattgtgcgcttgtaaaattgttactttgaggaagcagcttttgaacgtttaatacattatcgacgtgcatgcatttccttgat

SEQ ID NO: 29790 - DNA, 1240 bp, Glycine max
  Clone ID: TF_GmC1700_1
cagaaggttcgttaaagtcgaagataaattaatgcaaagtagttagttggcagatagaagaagatcatcatcataatcgatccgttacaattagggtttctgattggagcataatagcgtattatcatctcatctctcagcagcagcagcatggcggagcaccttgcatcgatcttcggcacggagaaggaccgcgtgaactgcccgttctacttcaagatcggcgcgtgccgccatggcgatcggtgctcgcgcctccacaaccgccccagcatctcgcccaccctcctcctctccaacatgtaccagcgccccgacatgatcacccccggcgtcgacccacagggccagaccctcgacccccgcaagatccagcagcacttcgaggacttctacgaggacatcttcaccgagctcgccaaattcggcgaaatcgaaagcctcaacgtctgcgacaacctcgccgatcacatgatcggcaacgtctatgttcagttccgcgaagaggaccaggccgccaaggcgcttcacgcgcttcgtgggagattctacaacgcacgcccaatcatcgctgatttctcccccgtcacggattttcgcgaggccacgtgtcggcagttcgaggagaatagctgcaaccgcggcgggtattgtaatttcatgcatgtgaagctcatcgggagagatctacggaggcgactcttcggccgcaaccaccgcggtggcagtgggacctaccaccgcgtcagccggagcaggagtcgcagccgcagcgcgagtccgagataccgccgggagagacgggagagtgattctcgtggagggcggcggagcagggagagggacggcagcggtggacggaggagacaacacgggagccctccggccagggaagggagcgaggagcgccgcgcgaggatcgagcagtggaatcgggagagggaggagaataaatgatttcacgatgattctatgttcatttgcttgcgatagaataaaccatcaatttcatcatcaaactattattattaccctgtgtccctccttagtagtccttagagtaatgaaattagggtttaaagaatagatggagtacttaatgggcaccactgtagtctaatggaaaagatggtctgatatgttggatgattacttggcatgatttaagactactgaaatagctttttttttttttttttttgctagtcgaagaaagaggcgatagtggaaagggatgatg

SEQ ID NO: 29791 - DNA, 738 bp, Glycine max
  Clone ID: TF_LIB4390-016-R1-K1-H3
caaccttttgatcgaactcgaggaccatcaccgatccgttaattgttccccaccccgcttacaattagggtttccaaaaccctacactacacattgagcaaacgcagattcaaatcaattaatcactcactgactcaccaaattcatcaaatcaacactccgattcagctctcagcagcaccaccacgtcatggcggagcaccttgttttgatcttcggcacggagaaggaccgcgtgaactgcccgttctacttcaagatcggcgcgtgccgccacggcgaccgctgctcgcgcctccacaaccgtcccagcatctccccgaccctcctcctctccaacatgtaccagcgccccgacatgatcactcccggcgtcgacccgcagggccagcccctcgacccccgcaagatccagcagcacttcgaggacttctacgaggacatcttcaccgaactcgccaaattcggcgacatcgagagcctcaacgtctgcgacaacctcgccgaccacatgatcggcaacgtctatgttcagttccgcgaggaggaccaggctgcaaaagccctccacgcactccatgggagattctacaacgcgcgtcccattattgccgatttctcccccgtcaccgacttccgtgaggccacgtgtcggcagttcgaggagaatagttgcaaccgcggcgggtattgtaacttcatgcatgtgaagctcatcgggagggatctacggaggcg

SEQ ID NO: 29792 - DNA, 845 bp, Glycine max
  Clone ID: TF_GmC1810_3
ccacgcgtccggagaagacgacagaagggtacggctgcgagaagacgacagaaggggaggaaagggaagccaaagcgaaaccctaaccctaacggagagatggcggagcacttggcatcgatattcgggacggagaaggacagggtgaactgtccgttctacttcaagatcggcgcgtgcaggcacggcgaccggtgctcccggcttcacacgaagcccacaattagcccaacgttggttctgtcgaacatgtaccagaggcccgacatgaacatgaacatcatcaccaaccccgatcagccccagccccaatctctcgaccccgataaggtccaggatcacttcgacgacttctacgaagatctctttgaggagcttagcaagtacggccccattcagagcttgaatatttgcgacaacctcgccgatcatatggttggaaatgtgtacgttcagtttagggaggaagaccatgcagccaacgccctcatgaatctgactgggaggttttattcaggtcgacccatcattgttgatttctctcctgttacggattttcgagaagctacttgtaggcagtatgaggaaaatgtatgcaatcgaggtggctattgcaacttcatgcacctaaagaagattagcagggatttgagaaggaaattatttggaagaaataggcgatggaatggccgcagtggaagcagaagcaagagtcctccaaggaatcgtaaccatggggagcatttacattctggtcgtggttctggtagaagagattttgacaggtcccatggccaccatggtaggaggcctagaagccgtagtcctcgatatagagggaaacg

SEQ ID NO: 29793 - DNA, 1272 bp, Glycine max
  Clone ID: TF_GmC1810_5
cggacgcgtggggggaacccaaaccgaaaccctaaccctaacggagagatggcggagcacttggcatcgatattcgggacggagaaggacagggtgaactgtccgttctacttcaagatcggcgcgtgcaggcacggcgaccggtgctcccggcttcacaccaagccgacaattagcccaacattggttctgtcgaacatgtaccagaggcccgacatgaacatgaacattatcaccaaccccgatcagccacaaccccaatcccttgaccccgacaaggtgcaggatcacttcgacgacttctacgaagatctcttcgaggagctcagcaagtacggccccattcagagcttgaatatttgtgacaacctcgccgatcacatggttgggaatgtgtatgttcagtttagggaggaagatcatgctgccaacgccctcatgaatctcactgggaggttttattcaggtcgtcccatcattgttgacttctctcccgttacggattttcgagaagctacttgtaggcagtatgaggaaaatgtatgcaatagaggtggctattgcaacttcatgcacctaaagaagattagcagggatttgagaaggaaattatttggaagaaataggcgatggaatggccgcagtggaagcagaagcaggagccctccaaggaatcgtaaccatggggagaattcacattctggtcgtggttctggtagaagagattttgacaggtcccatggcccccatggtaggaggcctagaagccgtagtcctcggtatagaggaaaacgaagtagaagtccagtgggcagagataggagtcctccgatcagagaaagtagtgcagaaaggagagctaaaatagagcaatggaacagggagaaggaacaaggggacactggtaacatgaacaattcgaaaagcagtgatgattatcaagaacagagtgttgcacaaaatggtagtgaatctggtaaccatcagatatagcaacaacaacgtaatgatttggcccaaaatctgctagtaagtgtggcaagtaatctgatttgtgttgtttgcacctgcatttagatggattcagttgccattgttattattctatttggaattgtcaatttagtgatagaactttgtaatatccacagcaacaacattttaattttctgcttcaattgtaatgtcctgcaaggtaggaaggaaaatggaaaatgaagcgatacatttgataaagttcagctatgaatgtttcatattttgttatcgagc

SEQ ID NO: 29794 - DNA, 2125 bp, Glycine max
  Clone ID: TF_GmC1810_1
ccttcaccatcccggattctccctgccactacaaattcccaacttcgcaaaccctaggcagcagcagcagcagcaacaacaacagcaacgaagaattcgaagagaaatcaaatcgaatctcatttgatctgtgtgtggttgcggcggcggcataccgcaccgatccggagaagctcactggaagaaaaggaaaggagggagccgcaaaccgaaacccaagggaagccaaagcgaaaccctaaccctaacggagagatggcggagcacttggcatcgatattcgggacggagaaggacagggtgaactgtccgttctacttcaagatcggcgcgtgcaggcacggcgaccggtgctcccggcttcacacgaagcccacaattagcccaacgttggttctgtcgaacatgtaccagaggcccgacatgaacatgaacatcatcaccaaccccgatcagccccagccccaatctctcgaccccgataaggtccaggatcacttcgacgacttctacgaagatctctttgaggagcttagcaagtacggccccattcagagcttgaatatttgcgacaacctcgccgatcatatggttgggaatgtgtatgttcagtttagggaggaagttcatgcattcagcgccctcatgaatctgacatgggattcccttatattcggtcgtcacatcatagccgtacagctttataggtaatatagttcttgcagaaatgtcccttttctcaaccggttaattattaacattccaacgtatgttggtcttgtatgcttgttactgtggttgatttgcagttgttgaatgtatgcattattttacagtcaggtacactgatcaacatgaagactaatgaacgagcagtttcaactctttgattaggggttttttgtttgcaatgtataattaatttttcctcttggaatatgaagtagcaagatcttgacgttgttatgaggtatgcagattcagatatccggtgttcagagatcagagtcgcccgataggtaagaggagtacaacgcggagtcctcgaaaaggggaatagcgaagtagaagtgctgagggtagggatagtagcactccgatcagaaaaagtagtgcagaaaagagagctaaaattgagcaatggaacagggagaaggaacaaggggaaactagttacaagaaaaatacaaaaagcaatgatgattatcaagaacagagtgttgcacaaaatggcagtgaatctggtaatcatcagatatagcaacaacaacgttgaggtttggcccaaaatctgctatcaagagtggcaagtaatctggtttgtgactttgtcgtttgcgctgagttagatggattcagttgccattgtttttattctatttggaattgtcaatttagtgatagaaccttgtaacatccatagcatcaatgttttaattttctgcttcaattgtaatgttctgcaagggaggaagaaaaatggaaaaagcggcgagtttaacttgttgcgaggatgaagcgatacatttgataaagttcacctatgaatgtttcatattttgttgtcgagcatttattgtatgtcaccaatgttgaagggtatttagatggaaaacagatgaaatgatgtatgaatttcgactatgtgaatagctaaaggtttttttttgtgttaagtaaaaaaaaaaaaaaaaaaagcggccgctctagaggagggtataaggttaatgctgaggaaatcaataatggtaatgctagcaaacatcatgggcatcagcagcaggagcaggaaccgcaatcacctcaggagggacaatgatctgtttatgttgtaatggttcatggcttgctctttgaggatgttttaacggatctttcagctggcaagtaatcgtgtttgtaggagaagccttggctggtttacttgctgcatttgtgcaggctctgaggaagatggcttcatttttataattttatttagttttctttttcctggcatattaggattttttagtgtgtaaaccttcgaacccaattgtgcgcttgtaaaattgttactttgaggaagcagcttttgaacgtttaatacattatcgacgtgcatgcatttccttgataaaaaaaa

SEQ ID NO: 29795 - DNA, 668 bp, Glycine max
  unsure (1)..(668): unsure at all n locations
  Clone ID: TF_LIB4392-021-R1-K1-A7
ggaaatgttagccaaagcgaaaccctaaccctaacggagagatggcggagcacttggcatcgatattcgggacggagaaggacagggtgaactgtccgttctacttcaagatcggcgcgtgcaggcacggcgaccggtgctcccggcttcacacgaagcccacaattagcccaacgttggttctgtcgaacatgtaccagatgttctacatgaacatgaacatcatcaccaaccccgatcagccccagccccaatctctcgaccccgataaggtccaggatcacttcgacgacttctacgaagatctctttgaggagcttagcaagtacggccccattcagagcttgaatatttgcgacaacctcgccgatcatatggttggaaatgtgtacgttcagtttagggaggaagaccatgcagccaacgccctcatgaatctgactgggaggttttattcaggcagtatgaggaaaatgtatgcaatcgaggtggctattgcaacttcatgcacctaaagaagattagcagggatttgagaaggaaattatttggaagaaataggcgatggaatggccgcagtggaagcagaaagcagagtcctncaagggaatcgtaccatgggggagcatttacattctggtcgtggttctggtagaagagattttgac

SEQ ID NO: 29796 - DNA, 2390 bp, Glycine max
  Clone ID: TF_GmC1557_1
gattccctccagagagagagagagaaaatcagaacacgctttgaaactgaaagagagagtaagtgaaggtgtgtgtgtgagagagagaatcaagagagaggagaaaacagagacaaacgctgtctgtgcgagttagagagtgagagaaaccccagaaaatcagaaaatctaacccccattttttctctctctagtttccattttgatcggaggttctcattgtggttttccgattattcgtcgaatcagctccgttctccggttcggttcggtgcaatggagcagtacggccggtccagtgaaggttcgcggtctgatccgtcgccggaatgggccgagcccgaagcccaaaccgggctcgaagagcctgtgtggcaattgggaatgggtggtggtgctggggaggaatcgtatccgcaacgccccgatgaggttgattgcacttactatttgaggaccggcttctgtggcttcggttcccgctgtcggttcaaccatcctcgtgatcgtgccgtggttgccggagctgagaggactgcaggggagcatccggaacgagtaggccagcctgtgtgccagtatttcatgaggacaaggacatgcaaatttggttcatcttgcaagtaccaccaccccaggcaggcaggagcagggggcgctgctgctacccctgtgtcactaaattattatggatatccattgcgacagggtgagaaggagtgttcctattatgtgaaaacaggacaatgcaagtttggtgcaacttgtaaattccatcatccagttcctgctggcatccaaattccaccatcgccatttgccccagtttcacctttgcctgtaccagtaccttcgccgttatattcaaccatgcagcccccacctggtccttcgtcccagcaaattggtgtgctggttgcgaggcctcctatgctgcctggctcattagtccagagcccctatggacctgtggtactgtcccctgccatggtacctatttctggctggggtccttatcaagcttctgcatcaggtgctgttcttccttctggtactccatctaatgttggttcagcacagctttatgggataacccagctaccttcaccagcagctgcctatcctggaccttatccaccttctggttccccagttggtcctccaagcagtagtcagaaggagcaggcatttccagaaaggtctaaccaaccagaatatcagtattatctgaaaacaggggaggttaaatttggtccatcatataggtataaccctccaccggacatgagtgtgccggacatgagtacgccaaaagcaaatgtgattcttagtcctgcaggtcttcctttgcgcccgggactaaaactgaagtctgtggacgaatcaaattagggataaaccagccattgtctccttacattttctccagtagccaacatcagggggcaccagcttgcactcattatgcacaacatggagtatgtaagtttggttctgcatgtaaattcgatcatcctatgggatcaatgagttatagtccatctgcttcttccctggctgacatgccagttgcaccctatcctgtgggttcaacaattgctactcttgctccatcatcttcatcttcagagttgcggcctgaacctagctcaggatccagtaaagagtctgttccatccagaatgccttcatcaacattgactgggtcaatcggctcgactttgtcgactggtggacccatttctcaatcgagcactcaaccaccttcccaaagttcaggtcctttagccgctgtcactagcaccacaagtagcaatgtctctcacacctcaagctaagcaatgtgaatgcatacctcatcattactccttttttcaatctcaattcttccactggacataattattcaaggagatcctccaataggttttgttttcagttatcctagttccattctcaggtctagcacacttcacaccaattatctttgtgttcatataaactttttgtggccatccctttgatcttgaataaaccatggccatccttgagaattttagcaatccatacgatcaccttgcttttgaataactcagaatctgcaaggccattgtgcacatgccctttcacatctccaataggttgtgctgcttatttgtgctccaattttttttgatatgagaacattctgtccagactttcgtttatcatgtgtttatgtctcttcatctgaacccttttttaatttgggaacaattttccatttctgccttgtaagtcctgttcaacaattttcccaacttgtatctagggtttaatgtgaagagaagtaatcaggagactacaatgaggcttcacattgctatcttataatataaggtttagataaa

SEQ ID NO: 29797 - DNA, 1736 bp, Glycine max
  Clone ID: TF_GmC825_1
ggctgcgagaagacgacagaaggggggggaggagaagtttctctttcgaggaatggggtggtggagaaggtggcaaatgacaattcaagtgaataatggttcagaatgaaacctgagtgagtatgggagaacaacaacaacaaccacaacctcatcgtccctaatcctcaagattcactgtggatgatgaatttgaggactggggaaacaatggattctggatcttatccggagcgtccaggggagccggattgttcatattacatgagaacaggcctttgtagatttggtgcaacgtgtcgatttaatcatcctcctaacaggaagctggctattgccactgcaaggatgataggcgagttcccagaaagaatagggcaaccagaatgccagtactatctgaagacaggaacatgcaaatttggagccacatgcaaatttcatcatcctaaagatcaggctggaattgctggaagagttgccttaaatattttaggctatcctctccgccctaatgagcctgaatgcacttattatttgagaaccggacaatgcaaatttgggaacacttgcaaattccaccatcctcaaccaagcaatatgatgctctcattacgaagttctcctgtttaccctaccgtccattctccaactacgcttggtcagcagtcatatgctggaggaacatacattcctagtcctcgatggcaaggtccttcaagttatgcgcccttaattctacctcagggagtggtttcagtgcctgggtggagtgcatacagtggtcaaatggggtcaatctctacttcagacagtccacagcaagcaatgagaaacggtcaaacatatggaacttctcgtcaaggtgagcttgcaggatcacaaggggcatattctcaattccgttctggcaccgttcctgtagggttttatacattgcagagggagaacatatttcctgagagacctggtcagcccgaatgccaattctacatgaagacaggagattgtaagtttggcgcagtctgtcggttccaccacccacaagagaggctagttcctgctcctaactgtgtcttgagtcccataggccttcctttacgtcctggagaacctttgtgtgtcttctattctcgttatggcatatgcaaatttggcccaagttgcaagtttgaccacccaatggaaattttctctcataatatctctgcatctccttcagctgatgccccaagcaggcatctgttaggatcttcatctggaactgctgcgttaaatttatcttccgaaggacttgttgagtcaagctcagcaaagcccagacggctttcattatcagagacaagacagattccttctggtgatgatgacatcgatgatgatggatgatgatgtctcttgaaaatgggtcatttggcttttacaatttttttctgaggggggaaatgattaatctgtaaattgattttcccattgctggagatgtacagaggtcatgtcaggttgattctgtcattctgaaattaaatgcagttgacagattcaattattctggatttcatgttacctggctgatttgataaatttaagcaaatgttgtcacgtttggtcaatcccaacgtgaacaatccttctgtccttaagccacaactctttctaattaacttttcacattatgtaaaaagtgtttttctgaaaatctataatgatcagtatttggctctaaaaaaaaaaaa

SEQ ID NO: 29798 - DNA, 2290 bp, Glycine max
  unsure (1)..(2290): unsure at all n locations
  Clone ID: TF_GmC74310_1
attaaacctacacactctcttttacagtgaaagtgtgagaaaaacccgtgtctctctctcgggttcgcaacgaggagacaacaccggagctctccgatcttncagaacattctagagtggcaacgggattcattcttcgcttcaatggctcgaggcacactagagagtagagaccgtacagtcctagtcagagagacacacaacactacaccaaaccaacgcacgcttgtacagtgaagtgaagctgtggaaatttccttcgaggaaacaagacaacctcgccgatctcacggaacattctagtagcaaccaacgagaatcttcacttcaaacaaccaaacactaaatcgtttgcatggacttgtacggtcggggtcaggccagaaatggatccaacccggtgaaccagcctgaatgccgctcgccgggcaccgacactggcctcgaagaatcgatttggcatttaacgctgggatcaggtgaatcttacccggagcgacccggtgtgcccaattgtgtgtattacatgcgaaccggtgtgtgcggatatggtagcaggtgtcgttttaatcaccctcgcgatcgtgctgcggttgctgcggcagtaagagctacaggggactacccagaaagggtgggggaacctccgtgtcagtattatttaaagaccggaacctgtaaatttggtgcatcttgtaaattccaccatccaaaaaatggaggtggatatttaagccaagctccactaaatatttatggatacccgttacggctgggtgagaaagagtgctcctactatttgaaaacggggcagtgcaaatttggtatatcttgtaaattccatcatcctcaacctgctggcacatcattgccaacttctgcacctcaattttatcaacaggtgcagtctcctacagttcctcttcctgaacagtatggaggagcttccacaagcttgagagtggccaggcctcctgtattgcctggttcatatgtacaaggggcttatggtcctgtacttctttctccaggggttgtccaatttcctggatggagtcattattcggcacctgtaagtcctgtgctatctcctggcgctcaacctgctgttggggccacttctttatatggagtgacccagttgtcatccccaacatcagcttttgctagaccatatactcctctgtcctctactaccgacccttcaggaagcaacccgaaggatcaattttttcctgaaagacccggtgaacctgaatgccaatactatctgagaacaggggactgtaaatttggattagcttgtcgatatcatcatcctcgggatcatattgtggcacggccacttcttagccctgttggacttcctttacgtccggggttacaaccttgtgcattttatttgcaaaatgggcattgcaaattcggctccacttgcaaatttgaccatcctttgggatctatgagatacagtccatcggcatcttctctcatcgatgtgccagtcactccatacccagttgggtctttgctgtctcagttggctccttcaacaacgtcttcagaccttcggcctgaactgatgtcagggtccaaaaaggaatccttttcagccagaataccttcttctggaaatagttctggtacttctgtcggtctaattttctcacaaggtgggtctgtctcgctatttgatgtgcaactctcaagtcagagtaatgcccctccaaacagtagcagaagcaccagacaaagcggtgaaatacgttgacctgactcgtacaaacttgaaaataagtcctcgttatatattggatgtgatttcacaagccttcattacttctgtctatagtcctcagtattttgatggcaactgttcaaagtttctctatcgctgttgagaattcatcgtccaattctgtttagaagccatactaggtcattattctcttttatgcttatgctcaccccatctgattatattattatctcaaataagcttcaatagaaaactcattttggtctttccgtcccccctccggatttttttttttttccctctattgagcgggcttttgacagcccataaaaaaaatgggtataaatcacgctccccacacgagcctttttggcttgacatgtggaattcaatttcttatttagaagaaagggatagctaagattgaactcatggtcacatggtcatagaagccatcatttcatgtcaaaaaccccccttcgtaaatagtttaagctgttgaataaaagcatgtgattcccctctttttcc

SEQ ID NO: 29799 - DNA, 920 bp, Glycine max
  unsure (1)..(920): unsure at all n locations
  Clone ID: TF_GmC122_2
atctaaacacatattctttggattaaatatccttaattcttttcattcatatgaatcagttgcaagtatggtgtcacttgccgctacaatcatcctgacaggaatggtatgtataatatattgatattgattgttcttacattttcctgtttcctaaacaattattttgcattatcattctttgatgcagcaatcaatccacccattgctggattaggcgcctctatttttccatcctcggctgctaatctgaatatcggacttcttaatccagctgtttctgtctatcaagcttttgaaccaaggctgtcaaatccaatgtctcaggtgggaattgcagacactatctatccccagcgacctggacagattgaatgtgatttttatatgaaaactggcgagtgtaaatttggggaaagatgcaagtatcatcacccaattgaccgctcagcaccatcactgtcaaagcaggctacagtgaaactcactcctgcaggattaccaagaagagagggtgctgttatctgcccatattatttgaaaactggaacatgcaagtttggtgcaacctgcaagtttgaccacccaccacctggagaagttatggagatggcaaaatcacaaggaacatcggccaatggaggggaagcagaaggcgatgaaatcgagacttctgctcaactttgagatctttcatgaaaactagactctatttgatgatcccttttagtttttccttatatttcttttctaatcatgatatgaacagttgtggctgaagacctgctttgtttactttagtgactagtttatctctggactggtatgaatgctttttttaatggttagttgaattacaagatttctataccaaanaaaatataaaaaaaaaaaaaggggggtggaggaaacacaaaaga

SEQ ID NO: 29800 - DNA, 943 bp, Glycine max
  Clone ID: TF_GmC86_1
aacctcaccacgccatcgccgttttccctcgacacaaccgaagcgctcttccatcgacacctccaacacctccaacactctcttgaacagcagcaatcatggccaactacctcgcctccatcttcggtaccgagcaggacaaggtcaattgctccttctactacaagattggcgcctgccgtcacggcgaccgctgctccagaaaacacgtcaagccgtcgtactcgcagactatcctgctgcccaacctctaccagaacccggcgtacgaccccaagaacaagatgaacccgcagcagatgcagatgcactttgatgcattttacgaggacatctggtgcgagctgtgccagtatggacttgctgaagagttggttgtttgcgacaacaacaatgaccatctcatcggcaatgtctacgtccgattcaagtacgaagaagacgcgcaaaaagcctgcgacgccctcaactcgcgctggtatgctggtcgtcccatctactgcgaactctcgcccgtgaccgatttccgcgaagcctgttgtcgtctgaacagtggcgaaggctgcgtccgcggcggcttctgcaactttattcatcgcaaggaaccaacggccgagctggacagagagctggacatgtgcacgcgcaagtggttgaaggagcgtggcagggacgcgaggagtatgtcaaggagtcctacaccgcctgcgacgaagaacaggttctagggtagatatagagtgggaagcgtgagacacgggctgaatacgaagggcgttttggtgttatacatgctcgcacagtttgggacatgttggttgatacctcgatatccgtagcgggcatggcgttgcaaattggcatttgtaaattagctttggtaaaatagtgaagtgtggataataggctagactaggctacgcaaaagcgatcatgtcagttc

SEQ ID NO: 29801 - DNA, 2272 bp, Glycine max
  Clone ID: TF_GmC122_1
cccacgcgttcgcacgaagaaaaaaaggcattgaaagcaagaaaagaagcaaacattattctcgtgagtgcatgcctgagtaactgagtgagtgagtgagtgagtgagtgtaacatcgttttctcgtttgtgttttttcctttaaaatggaaaaccacatctacgcctcctcttacagcccttccaccaactacagatccttccgtgacccccccgccgacaccatgttcctctcccaccacctccaccaccatcgcaccgacgcctcctccgccgccgccctccgcttcccctcctcggccctctctgccgtcgaagccgccgatattgccccgcctggcgtcacctcccgaatcgcctcctcctccgccgccgccgacgacgagaatttcctttccacctggccccctgccgccgccgccgcgcccttcgccctcgacctcaaacgctcttccgaagctctctaccatccaaccattttgggtacaattgggcaaagtgaagcttggtattctacaaacccactggccaagcgccctagatatgaaagtgcttccaatatgactatatatccacagaggccaggcgagaaggattgtgcccactatatgctcacaagaacctgtaagtttggagacagctgcaagtttgaccatcctttttgggttccagagggtggaatcccggattggaaagaggttccaattgttacaagtgaaactccacctgagagaccaggggaaccagattgtccatactttctgaaaactcaaagatgcaagtttggttcaaagtgcaaatttaatcatcccaaagtttcctcggaaaatgctgatgtttcttctggcttacctgagaggccatcggagcccccttgtgcgttctacatgaaaactggaaaatgtagatatggtgctgcttgtaaattccatcaccccaagggagatagctgcaaatttgaccatcctgtttgggttccagagggtggaatcccggattggaaagaggctccaaatgttgttacaagtgaaactcctcctgcgagaccaggtgaaccggattgtccatactttctgaaaactcaaagatgcaagtttggttcaaagtgcaaatttaatcatcccaaggtttcctctgaaaatgctgatgtttcttctggcttacctgagaggccatctgagcccccttgcgcgttctacatgaaaactggaaaatgtagatatggcactgcttgtaaattccatcaccccaaggatatccagattcagttgtctgacgacttgagtcaaaatgttgcacagacacaaacaaattctatgatgggtggagctacaggagatacacagccaattaaatctcttatatctccgtcgttgcaaaatagcaaagggcttccagtaagactgggggaagttgattatcacccatacatgaaaactgggacatgcaagtatggtgtcagttgccgctacaatcatcctgacaggaatgcaattaatccacccattgctggattaggtgcctctattttgccatcctcggctgctaatctgaatattggacttcttaatccagctgtttctgcttatcaagcttttgaaccaaggctgtcaaatccaatggtgggaattgcagaaactatctatcctcagcgacctggacagattgaatgcgatttttatatgaaaactggcgagtgtaaatttggggaaagatgcaagtaccatcacccaattgaccgctcagcactgtcactgtcaaagcaggctactgttaaactcactcctgcaggattaccaagaagagagggtgatgttatctgtccttattatttaaaaactggaacatgcaagtttggtgcaacctgcaagtttgaccacccaccacctggagaagttatggagatggcaaaatcacaaggaacatcagccaatggagaggaagctgaaggcgatacttctgctctggaacaactttgagatctttcatgaaaacttgactctgtatttgatgagcccttttatttcttccttatatgttttttctgatcatgatatcaacagctgtggctgaagacctgctttgtttaatttagtgactaatttgtctcttgattggtatgagtgctgttttttaatggagtgttgctaggtgcacccagctttatggttagttgaattacaagatttctattcttaaatgtcctaaaaaaaaaacccgaatgggctaaaggcaaataactgggcaccaacacaaaatgggcggccgccca

SEQ ID NO: 29802 - DNA, 1363 bp, Glycine max
  Clone ID: TF_GmC16887_1
gaaggctcccatacccggtcacagcggtgactcttttggttttcccccctctccttgctccttgctccaaaaccccttattcagggtcaccgctgtcagggttagggtttttccaccttctttatttaccaatcttcttctactaccacttttccctcgttccctctcttagtctcttcaattgtaagctttttgcgctagggtttcctctgcaatctcttgtacttgaagctcgttccttcttccggatctcgatctatggatacccgcaagaggggaagacccgaacccggcttcagcttaaatggcggattcaagaaatccaagcaagaaatggagtccttatcaactggtgtaggaagcaaatcgaagccatgtaccaagtttttcagcactgctggttgcccatttggtgagggctgccacttcttgcactatgttcccggtggttataatgcagttgcccatatgatgaatctaacacctgcagcacctccagcatcaagaaatgttgcagctctgcctcctgtaccaaatggttccgcaccacctgccgttaagacccgcatatgcaacaagtttaatactgcctgaaggttgcaaatttggtgacaaatgccattttgctcatggtgaatgggagcttggcaagcatattgctccatcatttgatgaccatcgcaccatgggacccactggagtaggtcgtcttgctggtcgaatggagccccctcctggccctgctgcaagttttggggccaatgccacagccaagatcagcgtagaagcttccctggctggagctatcattgggaagggtggcgtgaactcaaaacagatctgccgccaaactggagccaaactttcaattcgagagcatgaatctgacccaaatcttagaaacattgaacttgagggaagttttgagcaaatcaaagaagcaagtaacatggtaaaggatttacttttgaccctgcaaatgtctgcaccacctaaaacaaccccaggtgttcctggcgcacctgcctctcatggaagcaattttaagacgaagctgtgtgagaattttacaaaagggtcttgcacgtttggagatagatgtcactttgcacatggagctgctgaattgcgtaaatcaggagtatgaactttcttagtcaggcacattagctagggttatgattattgttgttgtgcattgctactgacaggacttctgatgttagttttgttgttgagttgctttacataacttgttttatttccgatttcaactctcgcttatatcatgaaactggtgttttctctaggctaccccatttggtcccaaataatgctatgaaaatagtgtgattttagttcc

SEQ ID NO: 29803 - DNA, 1319 bp, Glycine max
  Clone ID: TF_GmC1136_2
tgatgatggttggaatggtggtggtgatgaggggtgtgattgtattgagaatgtgaatgtgaatgagagtgagagtgataaggtgggtggagatgttgagggagttaaaggtgataggagctcttctagagctcaacaattccctttgaggccagaggctgaagactgtgcattttatctcaaaactgggacttgcaaatttggattcaattgcaaattcaatcatccgctactggctcttgcaagtgcgcatgtaataggggcactctctttcccccggacgaataggcaggccaagaaagagagtgcccctattaatggcggctcttgcaagtttggagcaaactgcaagttcaaccatcctgatcctacagctgttggaggaggaggaggtaatcctccttcagggtatggtaatggagggtctatttcattacaaggtgtatcacaaacatctgtaccctcctggtcttctccaagaacattaaatgaagcatctccttttgtgccaatgatgctttcacctactcaaggagtttctacccaaagttctgattggaatggatatcaggcatctgtctacttacctgagaggagcattcatccaccttctacatttgtcatgaacaacccagcaattgatacaaatgtttacatgcaccatcaaaagcagatgcctgttgatgagtttccagaaaggcctggtgaacctgaatgcagcttcttcttaaaaactggggattgcaagttcaaatctaattgtaaatttcaccatcccaagaatcgggttacaagattacctccatgcaacctcagtgacaagggtctacctttgagacctgaccaaagtgtctgctcacattacagtcgctatggaatttgcaaatttggaccagcttgtaagtttgaccaccccgataaacttgcagcccgtgatgattcctggacttgagcaacaatcctactcaaactcagctagtgctggggtggctgggataggtggaagtacaggcgtaactgatgcgacaattcagcaatctgtgtaaacatgtttgtctgaggatcttcttgctttgaggatgcatatcaccccaaattgttttcttcttaaacatgataaatttattttacttttcctagccctgtccaatgcagcacaagctttgcaaggaatagctgacatataatatatatcaaacagtttttatgtatttattacaagtaacatctgcatctgtagattatctcttgtttatggtttgttttctgtcagttggatcagtgttggataataattagactgttttgaaatggttgtc

SEQ ID NO: 29804 - DNA, 1459 bp, Glycine max
  Clone ID: TF_GmC31054_1
attaatggcgaagctgagccaagattcccattaattattagttatcatgtagcaaattagaagctgtttgataaaaatttgaaaaactaataattaatggcgagtcttggcagcttctgcacaattcaaacctcgttaaaaaaaaattataacactgacccacgggtccgtcccacacatatataacgcgctggctgggttccgtgatacgatatgatgtccatagatctaaccttgcgaaggtcggtcccttcccacacatatataacatactgactggatgaggtaagaccagataacatgcggtccgacacgtgacgttcattctgtctgttggaactgttggccttttagggttagggtttcggtttgtggatctattgttgcctctgcgatggatcgcaagaggggaaggcctgaagctgccttcaatttcaatggcggcgccaagaaatcgaggcctgaaacggactcctttccaactggtttaggaagcaaatcgaagccatgcacaaagtttttcagcacctccggctgtccatttggtgaaggatgccacttcctgcattatgttcctggtggctttaaagctgtctctcaactgatcaatgttggtagcaatcctgttactcctcaagttgggagaaaccctgttccaccatccttccccgatggatcttctcctccagttgttaaaacccgattgtgcaacaagtttaatacagctgaaggttgcaaatttggtgacaaatgtcactttgcccatggtgagtgggagcttggcaggcctacagccccatcatatgaagatccccgtgttttgggacaaatgccaagcagcagggtaggtgggcgagttgagcccccacatccagctcatggagctgctgccagctttggagcctcggctactgcaaaaatcagtatcaatgcttccttagctggagctgtcattggaaaaaatggtgtcaactcgaagcaaatatgtcgtgtaacaggagctaaactttccataagggatcatgacacggatcctaaccttagaaacatcgagcttgaaggcagttttgatcagatcaaacaagccagtgccatggttcacgaagttattctaaatgttagttctgcctctgggcctccaatgaaaagctttacttcgcagacttctgcccctacaagcaacttcaagactaagctgtgtgaaaactttgccaaaggttcctgcacttttggggaaaggtgtcacttcgcacatggaaatgatgaattgcgcaagtctggaatgtgatagcgttataatttttttttagcgaggtttgaattgtgcagaattttctagtttttcaatttttttatcaaacagcttctaatttgctacatgataactgaactaatggtgagtcttagctcagcttctaaaattcaacgcacattcaaatttgaaatttcctattgtcaa

SEQ ID NO: 29805 - DNA, 920 bp, Glycine max
  Clone ID: TF_GmC16887_3
gtttaatactgctgaaggttgcaaatttggtgacaaatgccattttgctcatggtgaatgggaacttggcaaacacattgctccatcatttgatgatcatcatgccatgggaccccctggagcaggtcgtcttgctggtcgaatggagcctccgggtcctgccgcaagttttggtgccaattccacagcgaagatcagcgtagaagcttccctggctggagctatcattgggaagggtggtgtgaactcaaaacagatctgccgccaaactggagccaaactttcaattcgagagcatgaatctgacccaaatcttagaaacattgaacttgagggaagttttgagcaaatcaaggaagcaagtaacatggtaaaggatttacttttgaccctgcaaatgtctgcaccacctaaaacaaccccgggtgttcctggtgcacctgcctctcatggaagcaattttaagacgaagctgtgtgagaattttgcaaaagggtcttgcacgtttggagatagatgtcactttgcacatggagcttctgaattgcgtaaatcaggagtatgaactttcttagtgaggcacattagccagggttattattattgttgtgcattgctactttagcagtactgacagtactttcgatgttagttttgttgttgagttgttttaggtcccaattgggatgtttgggatgatttttttttttcagttttgaaattattaaaaaccaaacttagtttatgttttgaaaaaaaaaaaaaaaaaaaaaaaaaaaaaaaaaaaaaaaaaaaaaaaaaaaaaaaaaaaaaaaaaaaaaaaaaaaaaaaaaaaaaaaaaaaaaaaaaaaaaaaaaaaaaaaaaaaaaaaaaaaaaaggggggggggccgttttaggggaccaaattttacttcccggg

SEQ ID NO: 29806 - DNA, 467 bp, Glycine max
  Clone ID: TF_GmC104291_2
ggttgcagagaaaaatatggagggaaccgcaacagggtgttacaagtgcggcagacctggtcactggtcacgggattgccctttctccgctcccaattccaatcctaaccctaaccctaaccctaaccctaaccccgccaccactcccaatccaaatactccaaatccttcttcctcttctttcaagcccagattcgccgccgaaaagcccaagaaactcccccgaacaaagcctaagctcacaccggagcttcttctctccgacgagggtctcggttacgtcctccgctacttccctcgcgagttcaaataccgtggtggtggccacgaggttcgcgatttgggtaacctgcttcgtctgtacaccgaatggcactctcgcttgctcccttattactctttcaatcagtttgttcacaaagtggagaaagttgctgctacaaggcgtgtaaagacttgccttagag

SEQ ID NO: 29807 - DNA, 2058 bp, Glycine max
  Clone ID: TF_GmC18165_1
ggctcgagaaaataatagaatttctagggctttataactctccattgtctcttccgatcagcccggaattcggctcgatctttcgattgaactcatttctctcttcttcgccacgcactcttgtctctgtaagcggtgattttggttctggacaatgtctcgtgtttatgttgggaatttagaccctcgagtcagtgagagggacctcgaagatgaatttcgtatatatggtgttcttaggagtgtctgggttgctcgaagaccaccgggatatgcatttattgagtttgatgataggagggatgcacttgatgcaattcaggccttggatggaaaaaatggttggcgtgtagagctttctcataattccaagggtggtggccgaggagggcgtgggcgtggaggtgaagacacaaaatgctatgaatgtggtgaacctggacactttgctcgggagtgccgattgcgcattggatcacgtggccttggaagtggaaggaggcgaagtccaagtccttatcggcgtcgtacaagtccaagttatgggtaagctacagtcctcgtgggagaagatctccaagacgacgtagcatttcacctccctggggtcgcaactacagcaggtccccttcatatcgtcctctccgtgatttcccttatgccaatgcagattaaaatcagaatgtgaacggagcaagtgctgaatagttgttaggatgttctctctgctatagtgtagttcctctaggattggttgagcataccacagacatgttagttatgttgatgtcatgacaatgggtattgttaagaacttggcttttgatggaactacatagggttgtagctggcaaaagggtgcgttggacactgttttgcattggctgtctctcttcagcttactgaaacctgaaggttgcttcagtcttccctactttatatagcatgttatgttaattgtttgttataaaaaaaaatatttctaatccactagggtaattttgatatatttgcattaaaggtgcctaaaatgttcatgtttctttgttttgaggtgtgattatcggccaaaacagcatcgtttcaccacttactacatcttgtctgcttctctgcttcatgcccccacaatcgtctcatcttgttgcttctgcatataagttgactaaaggttcgatgtcaacaagttggttgcatatgacctttttgcttactgttcaggaaagaatgctacatatgcatcctacttatgatttggaggagtctaaaggtggatggataaatgtagtcattggcttgctgcatctttgtgaaattaagttaaattggggttcctttagcgagtaactgcgtgtagtgtctgcttcacaccattctatatagttatattgatggttgctgcttctaattgtctgcatttgattaaaatgctacttgtttcatccgtggtctctggtatatgcttgccgtttgggagcaatggtcatcatcttggttgtgtaggacactgtattgtgtatcctccttcggcaaaatcacctgttgatctatgatctctgaggactgggactagaaagagtgattccatttaaccaattgagtactcgccaaatgtttttcattctccacttgctgctctttggtctgtgtccacagtttcctcatgtggctgattaacttttgcatgcttctgtatggaattgtgtgtcatcttcagctactggaatccgtgtcactttgtctccaatctgaagttttgttttgctaaatatcgtccgctcctaatcaagtgtattaactctggttgattggcagcattggttgcattagatatttgaatttgaggaattcattgcttcttgcccttgttttagaatgtgagttaagtgttgccactggcatttagctccactaagattagttgattttgatctggttaattatgttttaagaattaagtactgtttttttttgtgcaaaagaagtattgacttgggattgactaaatgagaaaactaaaatgtggaaatgatttttgttttttctataaaaaccccc

SEQ ID NO: 29808 - DNA, 736 bp, Glycine max
  Clone ID: TF_GmC18165_2
ggctcgagaaaataatagaatttctagggctttagaactctccattttctcttccgatcatccagaatcctcgagaattctttttgttgaactcacttctctcttgttcgccacgcactcttgtctctgcaagtgtaaggattcagtgtctgggttgctcgtagaccaccaggatatgcatttattgagtttgatgatcggagggatgcacttgatgcaattcaggccttggatggaaaaaatggttggcgtgtagagctttctcataattccaagggtggtggccgaggagggcgtgggcgtggaggtgaaggcacaaaatgctatgaatgtggtgaacctggacactttgctcgggagtgtcgattgcgcattggatcacgtggccttggaagtggaaggaggcgaagtccaagtccttatcggcgtcgtagaagtccaagttatgggtatgatcgcaggagttacagccctcgtgggagaagatctccaagacgacgtagcatatcgcttccccggggtcgcagctatagcagaatgtgaacggagcacgggctgattgctgaacaattattaggaagttctctctgctataagtgtagttcctctgggattggttgagcataccacagacatgttagttcttgtgatgtcatgacaatgggtattggtaagaacttggcttttgacaaaactacatagtgttgtagctgccaaaagggtgcgttggacactg

SEQ ID NO: 29809 - DNA, 803 bp, Glycine max
  Clone ID: TF_GmC18165_3
gaaaccccgcggcgacccacgcgtccgcttcaatttcccttccgatcatttttattcctcgagatttctttcgattgaacggatggctctcttcttcgccacgcactcttgtctctgtaagcggtgattttggttctggacaatgtctcgtgtttatgttgggaatttagaccctcgagtcagtgagagggacctcgaagatgaatttcgtatatatggtgttcttaggagtgtctgggttgctcgaagaccaccgggatatgcatttattgagtttgatgataggagggatgcacttgatgcaattcagcccgtggatggaaaaaatggttggcgtgtagagctttctcataattccaagggtggtggccgaggagggcgtgggcgtggaggtgaagacacaaaatgctatgaatgtggtgaacctggacactttgctcgggagtgtcgattgcgcattggatcacgtggccttggaagtggaaggaggcgaagtccaagtccttatcggcgtcgtagaagtccaagttatgggtatgatcgcaggagttacagccctcgtgggagaagatctccaagacgacgtagcatatcgcttccccggggtcgcagctatagcaggtcccctccatatcgtccttctcgccatgattcaccttatgccaatgcaatgtgaacggagcacgggctgattgctgaacaattattaggaagttctctctgctataagtgtagttcctctgggattggttgagcataccacagacatgttagttctgttgatgtcatgacaatgggtattg

SEQ ID NO: 29810 - DNA, 664 bp, Glycine max
  Clone ID: TF_GmC629454_1
cgcaaccttcctggtttcaatccaaatactcgtcattgtttgtatgggttggatgctgatttgattatgctctccttagctacacatgaggttcacttctcaatattgagggaggtagtcactttccctggtcaacaggagaagtgttttctgtgcggccaacctggccattttgcagctgattgtcgtggtaagccaggtgagaaagctgaggactggaatcctcctgaatgaataccccatttcacaagaagaaatatccagtttcttaacatctgggtgctgcgtgaatatttgcaatttgaattggagatacccaaccctccttttgagattgactttgaacgagtagtggacgattttgtatttctatgcttctttgttggcaatgattttcttccgcatatgccaacatatagagatccgggagggggctttaaatttattgatgcatatttacagaaaggaattcaccgccatgggtggttatcttactgatgcgggcgaggttttcttagagagagtgcaacattttattcagtctgttgctgttcatgaagatcaaatatttcagaaacgagttcggattcaacaggctacagaaattaatgaagagatgaaagctagggcaagaggagacatgcctggagaacacgtgcttagt

SEQ ID NO: 29811 - DNA, 1527 bp, Glycine max
  Clone ID: TF_GmC5288_3
ggagagatgtgtgtaaaatttgatgcatctccagtcatatgttttgagcatccgctatctatgtaccacttctttctcaaagatacctacataatcaagtttttgacttaggtacccaaactttattgggtccttgcatgttagtataaactgaggatccttttggaacccatatcattttaatgttactgtaatttttcttgaagtagcaagttgatatgccatgtcctcttcttccacagtaaaaacaagtgatagaattagaattacatttttgtgtggaagtggaaaagtttttatgaaacttttgttgtttttcagatttatatcctagtccatttttattagacacatatctttgtttacttaatataacatctaaattatttttactatatgaaaattttgcaagtgaatttttcaactctttaatttcttttacatatttatcacaacaactacaagaatctgatattttcttgtcagaaatagtggagatattaactttttcatttgttttagagattgagacttcatttctaagaagatctaattctttgtttaattttgaaatttcattttctaaatttgaaattgttttctttgatgatgaaactaattttgcaagtttaattgattctttatgcaaatcagcaaatgcatcttgcaattcatcaaaagaaatagataagttgtttgaagatgttacctcttcatcactttcgtaactttttgccataaggcaaagatttatctcttcattttcagaatcatcagaggattccaaatcattttcatcccatgtgatgtatgctttctttagtttcttctcactatgatttttcttttcagatttttccatctttttcttgaagatgggacaatcaaccctcagatgtccaggttgattgcattcaaagcattttagagtagaggatgaattttttgttcttctctttgatttaaaatttggtcgcctctgatttcctcttactttaagaaatttgttgaatctttttacaaagaaacttagatcatcatcatcatctgcatcattatcctgatcactttcttcttgaattgaggatgatgctttaagagcaattcctttctttttcttgtcattttcttcattttggtgcaatctcaatagttccatctcgtgttcaagaaggctggagaaggaaccgatagcaatgacgaggaatcgacccaagtaagaatctgagagaaaggccccaaataaggataagacgtcggatgcggcagtccaagtgtaaattacgcttgtgcccttcgcaataggcatgaggtaatcgtccctcagatacaatatcatgttgggcatgattccgtaactcgcaactttctccagacattcgttcactatgatgaagggcatggttcgcaagccaccttttttgatttgagaagaagaagtgccattttctaagagcttctcgttcgcggcatcagaggacttcatcatcgttttttctttttctgggatacgatgttgatgaattg

SEQ ID NO: 29812 - DNA, 172 bp, Glycine max
  unsure (1)..(172): unsure at all n locations
  Clone ID: TF_LIB4392-013-R1-K1-A12
ggatacatgnggattttagtcaaagtgtggcaacactgtggtcacaatacaggcggaaagatcaaaagggtaaaggtggtggttgcttcaaatgtggttctacagatcatattgctaaggattgtacgggagaggctacnatgaaacaaccacagcaaatacatcttaagga

SEQ ID NO: 29813 - DNA, 747 bp, Glycine max
  Clone ID: TF_GmC10165_2
gtgatttctatgggaagttttccgacagagatagaagtaaccctagaggttctagggatcagagaggttttagaagttcacgaggacgggaaggaggccaagactctaatgatgagtttggacgaggtggtagaagtttcagatctggcaacaacaggtctcgaacaacgggaaaaagcagcggcaatgattggctaattggaggcagtagtagatcaagcaggttttcatcatccaacagagatgggggccatggaggggcctgttttaattgtggaaaacctggccatcgggcatcagattgtatcacccaaaaacgagtctttttctagtttggacatttttcgctttgacaccacctagtccaagaattgagctcccactggtgatgccctaattagttcaagaaattgaaagatgctatccccgaaagaattacagaatgtgcactacgttacatatctcttgtttttttagtattctatagaggtctcccccttctgtcttagggttttgtttttctttacccttgttgtaatttttttatttatcatttacattgcggattcaagatagtattttttttttgcaagaacagtaactatacgatgctgttttgtcagcttaacaatcatgtttctttacccttgttttatgaaaatggcagaataggctaatagccttatatgtagaatacgcttccatctgctcatgatattacaacaatacaaattagtccttcgccac

SEQ ID NO: 29814 - DNA, 1660 bp, Glycine max
  Clone ID: TF_GmC137024_1
gcgcccacgcgtccgcccacgcgtccggttgaaaagcaaataccttagcacattgctttcagcaacttcttttgatgctgatggagggttgtttccacttgcttttggtgttgttgatgtagaaaatgatgacagctggacatggttcctgtctgagttgcataaggtacttgaggtgaatactgaatgcatgccagagtttatatttttgtcagatgggctaaacagtattacagatgcagtaagaaggaagttccctagttcttctcatgcattctgcatgcgtcacttgaccgaaagcattggcaaagagttcaagaactctaggcttgtccatcttctgtggaaggcttcatattccaccacaaccattgcatttaaagaaaaaatgggtgaaatagaggaggtttctcctgaagctgctaaatggttacaacaatttcatccttctcaatgggcccttgtacattttaaagggactcgatttggccatctatcctctaacattgaggagtttaataaatggattcttgacacccgggaattgccaattattcaggtgattgagcggattcatagcaagcttaaaactgagtttgatgacaggcgtttaaaaagcagctcatggtgctctgtacttgccccatcagccgagaagctaatgactgaagccattgaccatgcatctacatatcaagtccggctcgatgatgaagtagagtttgaggttctttcagccgatcgatcagatattgtaaatattggcagccatagctgttcctgccgggattggcagttaaacggtattccatgttcccatgctactgctgctcttatctcttgtcgaaaggatgtttatgcatttacccagaagtgttttactgctgcaagttacaggaatacctacgcagaagctatacaccacatcccaggaaaacttgaatggagtaaaacagatgataagtcttctatggatgataatatccttgttgtaaggccaccaaaattacgacgaccaccgggacgccctgagaaacagatgtgtgtggatgaccttaatcgagagaagcatacagtgcattgtagtcggtgtaatcaaactggacattacaagagaacttgtaaagctgagatgattaatagtatagagcagttttagttgtctgattatgtactaagtggttcaccaaagaactagtttagttttaacatctagaggccctatgtttaggacattcctatgatgcagatcatgtagaagttagatatacatcactgtattaaatccgcggtgtaatagaaatgaagtttacaacattggcaggtttgtaatcgccctgagaaacgaatgtgtgtggatgaccttaatcgcgagaaacatacagtgcattgtagtcggtgtaatcaaactggacattacaagagaacttgtaaagcagagatgattaatagtatagagcagttttagttgtctgattttgtacttagttcaccaaaaaactagtttagttttaacatctacagaccctatgtttagggcatacctatgatgcagatcatgtaaaagttagatatatatcactattaaatccgcgggtgtaataaaaatgaagtttacaacattggcaggtttgtaatccaaagcccctaatagtgtttg

SEQ ID NO: 29815 - DNA, 245 bp, Glycine max
  Clone ID: TF_LIB3049-042-Q1-E1-G10
cacgcttcagggatgcagaaaaaatatgaaggaaaccgcaccagggtgttacaattgcggcaaacctgttcactggtcacgggattgccctttctccgctcccaattccaatcctaaccctaaccctaaccctaaccctaaccccgccaccactctcaatccaaatactcgaaatccttcgtcgtcctccttcaagcccaaaatccccggcgaaaagcccaagaaactcccccgaacaaagccta

SEQ ID NO: 29816 - DNA, 4143 bp, Glycine max
  Clone ID: TF_GmC988635_1
atggcgacgaacagccattttccggcgatttttccgatcctcgacggaagaaattacgatcagtggagtaggaagatgaaggcgatcctcggctatcaggatgtgtgggatctagtgcagaacggattaattccgttgccggagaacgcaaacgctgcgcaacaaacagtttacagagaatcgaagaaggaggattggaaaggtctatgcatcctccatcagtgtgtgaatcctgcaatttttgagaaaattgcgagatcggagacgagtaaagaagcgtgggatattcttgcgaattcctacgccggtgatcagaaattgaagaaggtgcgacttcaaaccctacgaagacaatatgaattgctagggatggaggagagtgaatcaattgctgcatatttcactagagttcaaacgatgacgaatcagatgctgtactgtggtgaaacgttgtctgatgaatcaatcgtggagaagattttgcgatcggtgtcatcgcgatttgatcacatcacggtggcgattgaacaggcgaaagatctgtcgacgatgacgatagaagaacttcaaggatctcttgaagcgcatgagcagagaatgaatgagaagaaaactgtgaagcctagtaccgagcaagcgctggcggcacaaacaggcaacaaatctggtggaaatcaaagaggacgtggtagaggtagaaacaattacagaggaggaagaggaagaggtaattacaataactcgaattctgctaaagtaaactctagtgaaaacagtagcaataataaacaaggaaataatcatactgaaaattatagaggaagaggaggtagaggttttagaggaagagggagaaaatttgataagagttatatacagtgttataactgtgggagatatggacattttgctgatgagtgctacagcaatgtcaatggaaatgatgctaaaatggctgaagaagaggaggagacagaggaaactctattaatggccattgaagaaaagaagagcagtgatgaaacagtgcaaatggtgtcaattaagaaggaaggtgagaatggtgagtactgggttctggacacaggttgttcaactcatatgacaggaaggagggagtggtttgttgaacttgatttcacaatcaagagtagagtaagatttgctgatgatagaaccatgaaggtggaaggtgtggggaaggtgatgataaggaaaaaagatggttcactgtgctacattactggtgttctttatgtgccaggaatgaagagtaacttgttgagtattggacagttactagagaagggatacagaatggtgcttgaagacaaggctatgaaggtgtatgatactgaacataatctgttgatgaagggaattctttctaataacagaatattcaagattgagttgggtatgttgttgcagcagtgtttagctacagcagttgacaaagaagaatggttatggcatttcagatatgggcacttgaattttggtgatctgaacaggatgcagagcaaagcaatagtgaaaggcctgcctcatatccatgttccaaaggatgtatgtgcagaatgcatggaaagtaagatgtcaagaggtgccttcaatccaaatgtgccaagtagatcaaaaagaaagctgcaggtgattttctcagatgtgtgtggcccaatacaacatgaaactcctgcaggtaacaagtattttgttacatttattgatgacttcaccaggaaactttggatttatttgattaagaggaagaatgaggtgttaggagtattcaaaaaattcaaagtactagtggaaaaacagagtggacagaatatagagattctgaggactgatggtggtggggagtatgttagcactgagtttgatgaatattgtgagaatgaaggaataacacatgaggttacacctccatatactcctcaacataatggagttgctgagaggaagaataggacattgcttaatatggtgagaagcatgttaaaaagtaagaacatgcctaagatgtggtggggagaggctgttaacactgctgcatatattataaatagaagtccaacaaagaaaatggagaatattacccctgaggaagcttggacaggtgttaaaccaaatgtatcacattttagagtatttgggtctgtttgttataggcatgtgcctgatcaacttagaacaaagctggatgataaaggagaagtgatgattatggtgggttatcattcaactggtggttacaaactagtgaatcctgtgaacaacaaaattgtgataagtagagacatagtatttgatgagggaaaagcgtggaagtggagtgaaaagagagagagttctactggtgtagaacaaaatctgtttgatgtgcctgctggtgaaactgagtcagacattgagggtgaaacagggccagttgaagataatgatgatgaaggtggtagtcctgagatgccaagaagatcattgagacaaaggcaggttcctgcaaggttaaatgactatgagataatgcctgatggtgcaattgatgatgaaggtaatttagtgcactttgcactacttgctgaaacagaaccagtaactttgcaggaagcaatgaaaaactctaagtggctagaagctatgaaagaggaactcagatccatagagaagaacttgacttgggaattggttgaattaccaaaaggaaagaaagcaataggtgtgaaatgggtgtataaagtgaaagttaatcctaaaggtgaagtggtgaagtacaaagcacggttagtagctagaggattcctccaaagacatggtgttgattatgaggaagtttttgcacctgttgcaaggattgaaactgtgagagttgtggtagctcatgctagtatgcagaggtggaaagtacatcaacttgatgtaaaatctgccttcttaaatggagaattggaagaggaagtttatgttgagcaaccagcaggttttgtgaaacaaggaagtgagaaaaaggtactgaaattgagaaaagccttgtatggcttgaaacaagctccacgagcttggaacaaaaagatagataagagtttaatcaacatggggtatgtgagatgtatttctgagcatggagtgtatgtgaagtcagggggtggtgatatagtaatactatgcctctatgttgatgatttgttggttactggaaacaatgaaactaaggtaactgaatttaaaaggaaaatgatgagtacttttgaaatgacagacctaggagagatatcctactttctaggaattgaatttcaaaatactagtgatggtgtgctactgtcacagaaaaagtatgtttctgatgtactgaagagattcaatatgcaacactgtaatggtgctgcaacaccagcagaagcaggattatggcttgataaaaatgttgatgagccagaagttgatgctactgagtttagacaggtggttggggcactgagatatctctgcaacaccagacctgatattgctttcagtgtaggtctgattagcagagttatggacagacctagaacatctcaccttgctgctgcaaaacgaattctaagatatgtcaaagacactatggcatatggaattcttctacctagtaaatgcagagaaaatgagaaaggtctctatggtttcactgatgcagattggggtggtgataaaactgatagaaagagcactgctggctctgtatttcttcttggatcaggtcccatttcctggagttcaaagaaggaatctgttgtggcattgtcctcatgtgaagctgagtatattgcagcttcaatgggaggttgtcaggccatctggttggataatttgatgcaggaactaatgataaaaaaggaaagtgttgtggagctatttgtggacaacaaatctgcaattagcttggccaaacatccagtagcacatggcagatccaaacacatagagactcgttatcatttcttgagagatcaagtcaccaaagggagattgaagctgagctattgcagaactgatatgcaggtagcagatatcttcaccaaggcagtgaagagagaaacttttaagaagctgaggaacattctgaatgttgttgactgtaatgaatttgtttag

SEQ ID NO: 29817 - DNA, 4029 bp, Glycine max
  Clone ID: TF_GM436D07rgnG8.C1.o10.ma
atggcgacgaacagccattttccggcgatttttccgatcctcgacggaagaaattacgatcagtggagtaggaagatgaaggcgatcctcggctatcaggatgtgtgggatctagtgcagaacggattaattccgttgccggagaacgcaaacgctgcgcaacaaacagtttacagagaatcgaagaaggaggattggaaaggtctatgcatcctccatcagtgtgtgaatcctgcaatttttgagaaaattgcgagatcggagacgagtaaagaagcgtgggatattcttgcgaattcctacgccggtgatcagaaattgaagaaggtgcgacttcaaaccctacgaagacaatatgaattgctagggatggaggagagtgaatcaattgctgcatatttcactagagttcaaacgatgacgaatcagatgctgtactgtggtgaaacgttgtctgatgaatcaatcgtggagaagattttgcgatcggtgtcatcgcgatttgatcacatcacggtggcgattgaacaggcgaaagatctgtcgacgatgacgatagaagaacttcaaggatctcttgaagcgcatgagcagagaatgaatgagaagaaaactgtgaagcctagtaccgagcaagcgctggcggcacaaacaggcaacaaatctggtggaaatcaaagaggacgtggtagaggtagaaacaattacagaggaggaagaggaagaggtaattacaataactcgaattctgctaaagtaaactctagtgaaaacagtagcaataataaacaaggaaataatcatactgaaaattatagaggaagaggaggtagaggttttagaggaagagggagaaaatttgataagagttatatacagtgttataactgtgggagatatggacattttgctgatgagtgctacagcaatgtcaatggaaatgatgctaaaatggctgaagaagaggaggagacagaggaaactctattaatggccattgaagaaaagaagagcagtgatgaaacagtgcaaatggtgtcaattaagaaggaaggtgagaatggtgagtactgggttctggacacaggttgttcaactcatatgacaggaaggagggagtggtttgttgaacttgatttcacaatcaagagtagagtaagatttgctgatgatagaaccatgaaggtggaaggtgtggggaaggtgatgataaggaaaaaagatggttcactgtgctacattactggtgttctttatgtgccaggaatgaagagtaacttgttgagtattggacagttactagagaagggatacagaatggtgcttgaagacaaggctatgaaggtgtatgatactgaacataatctgttgatgaagggaattctttctaataacagaatattcaagattgagttgggtatgttgttgcagcagtgtttagctacagcagttgacaaagaagaatggttatggcatttcagatatgggcacttgaattttggtgatctgaacaggatgcagagcaaagcaatagtgaaaggcctgcctcatatccatgttccaaaggatgtatgtgcagaatgcatggaaagtaagatgtcaagaggtgccttcaatccaaatgtgccaagtagatcaaaaagaaagctgcagaggaagaatgaggtgttaggagtattcaaaaaattcaaagtactagtggaaaaacagagtggacagaatatagagattctgaggactgatggtggtggggagtatgttagcactgagtttgatgaatattgtgagaatgaaggaataacacatgaggttacacctccatatactcctcaacataatggagttgctgagaggaagaataggacattgcttaatatggtgagaagcatgttaaaaagtaagaacatgcctaagatgtggtggggagaggctgttaacactgctgcatatattataaatagaagtccaacaaagaaaatggagaatattacccctgaggaagcttggacaggtgttaaaccaaatgtatcacattttagagtatttgggtctgtttgttataggcatgtgcctgatcaacttagaacaaagctggatgataaaggagaagtgatgattatggtgggttatcattcaactggtggttacaaactagtgaatcctgtgaacaacaaaattgtgataagtagagacatagtatttgatgagggaaaagcgtggaagtggagtgaaaagagagagagttctactggtgtagaacaaaatctgtttgatgtgcctgctggtgaaactgagtcagacattgagggtgaaacagggccagttgaagataatgatgatgaaggtggtagtcctgagatgccaagaagatcattgagacaaaggcaggttcctgcaaggttaaatgactatgagataatgcctgatggtgcaattgatgatgaaggtaatttagtgcactttgcactacttgctgaaacagaaccagtaactttgcaggaagcaatgaaaaactctaagtggctagaagctatgaaagaggaactcagatccatagagaagaacttgacttgggaattggttgaattaccaaaaggaaagaaagcaataggtgtgaaatgggtgtataaagtgaaagttaatcctaaaggtgaagtggtgaagtacaaagcacggttagtagctagaggattcctccaaagacatggtgttgattatgaggaagtttttgcacctgttgcaaggattgaaactgtgagagttgtggtagctcatgctagtatgcagaggtggaaagtacatcaacttgatgtaaaatctgccttcttaaatggagaattggaagaggaagtttatgttgagcaaccagcaggttttgtgaaacaaggaagtgagaaaaaggtactgaaattgagaaaagccttgtatggcttgaaacaagctccacgagcttggaacaaaaagatagataagagtttaatcaacatggggtatgtgagatgtatttctgagcatggagtgtatgtgaagtcagggggtggtgatatagtaatactatgcctctatgttgatgatttgttggttactggaaacaatgaaactaaggtaactgaatttaaaaggaaaatgatgagtacttttgaaatgacagacctaggagagatatcctactttctaggaattgaatttcaaaatactagtgatggtgtgctactgtcacagaaaaagtatgtttctgatgtactgaagagattcaatatgcaacactgtaatggtgctgcaacaccagcagaagcaggattatggcttgataaaaatgttgatgagccagaagttgatgctactgagtttagacaggtggttggggcactgagatatctctgcaacaccagacctgatattgctttcagtgtaggtctgattagcagagttatggacagacctagaacatctcaccttgctgctgcaaaacgaattctaagatatgtcaaagacactatggcatatggaattcttctacctagtaaatgcagagaaaatgagaaaggtctctatggtttcactgatgcagattggggtggtgataaaactgatagaaagagcactgctggctctgtatttcttcttggatcaggtcccatttcctggagttcaaagaaggaatctgttgtggcattgtcctcatgtgaagctgagtatattgcagcttcaatgggaggttgtcaggccatctggttggataatttgatgcaggaactaatgataaaaaaggaaagtgttgtggagctatttgtggacaacaaatctgcaattagcttggccaaacatccagtagcacatggcagatccaaacacatagagactcgttatcatttcttgagagatcaagtcaccaaagggagattgaagctgagctattgcagaactgatatgcaggtagcagatatcttcaccaaggcagtgaagagagaaacttttaagaagctgaggaacattctgaatgttgttgactgtaatgaatttgtttag

SEQ ID NO: 29818 - DNA, 719 bp, Glycine max
  Clone ID: TF_GmC121484_1
ctcgagccgaatcggctcgaggaagaaccctgcatttaagccacctgcggattataggccccccaagcttcagaagaagctttatataccgatgaaagaataccctggttacaatttcattgggcttattattggtcctcgaggtaacacccagaagcggatggagaaagaaactggtgctaaaattgtgattcgtggtaagggatcggtgaaagagggtaggcttcagcagaagagggatttgaaacctgacccttcggagaatgaagatttgcatgtgttagttgaggcagagacaccggagtcgcttgaggctgctgcgggtatggtggagaagctcttgcagcctgtggatgaggtattgaatgagcataagaggcaacagcttaaggagcttgctgcgttgaatgggacgatcagggatgaggagtattgcaggttgtgtggtgagcctggtcatcgccaatatgcgtgtcctactaggacatcaacgtttaagagtgaagttgtgtgtaagcattgtggggatggtggtcatccaagcatagattgtccggtgaagggtgctactgggaagaagatggatgatgagtatcataatttccttgcagagttaggaggttcggttcctgaatctgcaacaaagcaaaccagtacattggcagtgggggcaggcacttcttggaagcaatcctccttgggctaacaattttaatact

SEQ ID NO: 29819 - DNA, 942 bp, Glycine max
  Clone ID: TF_GmC79463_1
gaaaaaaacaggatttaaagaccatgactattaagcaactcatgggctccttacaagcatacgaagaaaaacaaaagagaaaaattaaacaaaaggaggctacggagcaactactacaactcaacgtaaaggaagcaaactatgcaaattacaagagccaaagaggacgaggtcgtgaccaagatcgtggacgtggacgaggacatggaggagaaggtagaggtggttatcaaaaaccactccaacaaattcaacaatggagaaagaagttggaatccacaagtaacaagaggtcgtggaagaggaaattcatggtcgaggtatgacaaatcacaaatcaagtgcttcaattgcaacaagattggtcactatgcatccgagtgtagattctcgaagaaggttgaagagaaagctaacttcgtagaagaaaaaggcggagaagaagaaacttcgctattcgcgtgccaaaacaaatttgaagagaaaagaaacaagtggtacctcgacaccggcgcaagcaaccacatgtgcggcgataaaagcatgttcgtggagatcaatgaagcggcaactggcgatgtctcatttggagatgactcaaagataccagtcaaaggcaaaggtaaaattctcatacgtttgaagaatgggagtcatcaattcatatccaatgtctactatgtgcctaacatgaagaataatattttgagcttgggacaattattagagaaaggctatgacatccatttgaaagaacacagtcttttcttaagagattgtagacataacttgattgctaaggtgcctatgtcaaagaatagaatgttcctcttgaacatttaaaatgatgtgacaaagtgtctcaaggcttgctataccgactcttcgtggctatggcatctatggttcgggcacctcaacgaagacggtctagagtcgacc

SEQ ID NO: 29820 - DNA, 3988 bp, Glycine max
  Clone ID: TF_GMCosmidSEREIS.C1.o2.np
cttttggaactgaatgaagaggacaattgttggatagacatgagaggcatgaagggagaagaaggagaggaaatgaggaagaaccaagaggaaaccgagatgaggaaggaagagtttccattccaccatttaggggtaaaagtgatcctgaagcctatattgagtgggagttgaaggtagaacaaattttctcttgtcacaccctaactgaaaagaggaagatcaagctagctaccttggactgactatgccttagtttggtgggatcaattccaaagggagagaaagaggtatatagagcctatgttggagacttgggagaagttgaaaagagtgttgagaaggaggtatgttccatctcactaccatagagagcttcttgataagctccaaagaatgacccaagggagtaagagtgtagatgagttctacaaagaccttaaatagccctgattcgagccaatgttgaggaggatagggaggcaaccatggcaaggtttcttaatgggatgaatggagatataagggatgtagtggagctgcaaaattatgtggagatagaggatatagtccatcatgctatgaaaatggagcagcaattaaagaaaaaaagtgtgaggaagagttcatctaattttgataactctaggtggagggaggggtttaagaaagagggaacttcatccaataggaccccaagggctgcaccacagcccacccaaaataggggcaaggaagtggccaacaattcttggtctagagacataaagtgctttaagtgtttaggtagaggacacatagcttctgaatgtcctactaagaaagttatgatattaaaagattatggggaaatcacaagtgagagttctcattctgaaccatcaagtgaagaaaagagtgcggaagaggaggagatccttgaataagacttgtttattgtgaggaggatgttaggagggatagccaaggagagtaaggaaagccaaagagaaaacatattccatactaggtgtcttatccaagggagggtgtgctctttgatcacagatggagggagttgcacaaatgtggctagtgctaggttggtgaagaaaatgaacttagagactaaaccccatcctagaccttataagctacaatggcttagtgaggaaggtggattgagggtggataagcaagtggagattcagttttctattgggaagtataaggaaaaaattctgtgtgatgtggttcctatggaagctagccatgtgcttcttgggagaccatggcagtttgatcaaaaagctcgccatgatggtcacaaaaataaatacattttttatcatgacaaccgcaaggttaccttggtttcattatgtccaaaagaggtttgtgatgatcagagtatcatgagagaaaaaaaagagtaagagagaaaagaaaatgaaaaagagaaaaaagaaaagaaagagagagacccacaagataaagaaaaagagaaaaaagaaaaaagaaaaagtggagaaaagaaagtgagaaagaatggattatttgtgaaaagtggagaggtgaggagctttaatggcaaggaagtctatgtatatactttataataaggagattgctacccttgattcagaccttgaacttcctagtggagttaaatctattttgcaggaatttcaggatatgttttcaaaggagatgccacaaggactcccaccattaagaggcattgaacaccaaattgatttggttctaggagctgtgttgcctaataggccaacatgcaggagtaatcctcaggagacctaagagatccaaaagtaagtcactgatttgatgactaaaggttgggtagaggaaagcttgagcccatgtattgttcctatcatattggtgccgaagaaggatgaaagctggaggatgtgctcaaattgtagagctgtcaacaacatcaccattaagtacatgcatcccattcccaggttagatgatcttcttgatgaattgtatggatcatgttatttctctaagatagatttgaaaagtggatataatcagattaggattagagaaggtgatgaatggaaaacagcttttaaaaccaagtatggcttatatgagtggaaggtaatgccatttggtctaacaaatgcccctagtactttcatgaggttaatgaaccatgttttgagagagttcttaggaaaatttgtggttgtgtactttgatgacattcttgtgtatagaaaaaacttggatgaacatttgcaacatttaaaatctattttgcatgtgcttcgaaaacaaaggttgtatgcaaatttggaaaagtgcacgttttgtaaagatcatgttgtgttcttaggatttgtggttaactctagtagagtgcatgtagataaagagaaaataaaagcaatccaagagtggccaattcctaagaatgtgagtgaagtgagaagtttccatggcttagctagtttctataggaggtttgtgaaggacattagtactattgttgcacctcttaatgaactagttatgaaacatgcaagatttaaatggggagaggaacaagagaaaacattttttgtcctgaaagagaaattaacaaatgcacccatacttgctttgcctaactttgctaaatcctttgaacttgaatgcgatgcatctgaggtggttgctgatgctttgtcacgcagttatgctttactatatactcttgaagctaagtttctaggttttgagtgcattaaggaattatatgaacatgatgctgatttttcacatatttaccaaacatgttatcctattgcatttgatgggtattttaaacatgatggttatttggttaaggataagagactttgtgtgcctaagagttccatcaaggaagttcttattaaagaggctcatgaagggggggttaatggggcattttggagttcaaaagatatatgatatcttgcatgagcatttttactggcctcacatgaaatctgatgtgcattcattatgtaataagtgtcttgttagcaaaaaggctaaatctaaagtcaagccacatggtttgtatacttcattacctattcctgaacatccttggattgatatttctatggactttgtttttggtttgcctcggtccaagggaggaaaggactcaatttttgtggtggttgataggttttctaagatggctcattttatatcctgcaagaaggtggatgatgcttgccatgttgttgatttatttttcaaggaagtagtaagattgcatgggttgcctcggagtattgtaagtgaccgtgactctaaatttcttaaccatttttggaggactttgtgggggaaaataggtactaagctattgttttcaactacatgtcatcctcaaacttatgggaaaaccgaggtggtcaacataaatctttctactcttcttagggctgttattaagaaaaatattaagacttgggaagagtgtttaccacatgtggaatttgcttgtaatagggttgtgcatagtactactcaattgtcaccttttgaaattgtttatggttttaaccctttaactcctttggatttgttgcctttacctgacatttcataatttaaagataagtttgggtaggtcaaagccgaatatgtcaagaagatgcatgagaaagtcaagtcccaaattgagaagaaaatggaagggtatgcaaaatatgcaaacaaaggaaggaaaaaggtaacatttgaacgaagtgattgggtttgggtacatttcaggaaagagtggttcccttcccaaaggaagtccaagctcatgccaagaggagatggtccatttcaagtactggccaggatcaatgataatgcctacaaaattgatttgccaagagaatatggggtaagtgctacttttaatgtagttgatctcactcttttcgatgcaggtgatgacttcagagatttgagggcaaatgcttgtcaagaaggaggg

SEQ ID NO: 29821 - DNA, 1163 bp, Glycine max
  Clone ID: TF_GmC9855_12
tacggctgcgagaagacgacagaagggcgtaattcgaaatctgtaatgcatgctgggaatacagtgcaggagaagctgatagtaaagcattttgctagtatttcttcttcgaatactcaagaagcgacgtcaactggagttaacccacaattatcaccatcttcaactatgttcttctgaaaagatgtctcgcgtgtatgttggtaacttggattcacgagtcactgagagagatctcgaagacgaattccgcgttttcggagttattcggagtgtttgggttgcacgtagaccacctggttatgcttttattgactttgatgaccgcagagacgcacaggatgctatccgtgaattggatggcaagaatggttggagggttgagctttctcacaactctagaggtggaggtggtggtcgtggtggtcgctctggtggttctgatttgaaatgttacgagtgtggtgaacctggtcattttgctcgtgaataccgcatgcgtggtggttcaggaagacgccgtagccgtagtggaaggagattccgtagtagcccaagttatgggcgaaggagttacagtcctcggtgggcggtcccctgatcaccgtagtaaatcatctcgtggacgtagctacagcaggtctcctcctgaatcccgcatgcgtggtggtccagaagcacacggaagtgtgtagtccgcccagattcggtaggagcccaagttatggtcgaagtccttgtgggcggtcccctaggcaccgcagtttgtcacctcgtggatgtagctacagcaggtctcctccttattgtgggcgtgaggaggttccttatgctaatggaaatggccttagggaactacgcagaagcagaagttgattttgagagtttggtattgggtatctgtgattgttaagagaatagtgagattttgttaatttagtggtgctttgactgaagtatgagtctgttttgttgggcaaggccctgagtttctactcttggattggaatagttagtttattttatgtctcagcttgtgttgaatttatctttgcttgtagtttcattgcaggtaatgatcttgttaaggttgttgttactagtttgttaaatatagttccagatctttttgcaataaaaaaaagtgctttccttctctgttg

SEQ ID NO: 29822 - DNA, 1917 bp, Glycine max
  Clone ID: TF_GM310N10.C12.o2.np
gtattgacaatcaaaatttctattccttggattatggggttgaactaagcacatgtttttaaggaaaggttcatcaagtcaaggtcaagtatggaagaagaaagaagaaaaataatgaaagaaatgaaaagagaaaaacatgcctcctatagtagtcataactcttgcaagagcctaagtgaagaacttcgtgactattatgaaggaaggcataggtcacatcttaattgggaaaagaaggttgaacaactctttgcttgccatcatattagcgaagagagaaaagttccattggctacccttagctttcaagggtatgccctctattggtggacttcccttgttaggaaacaaaggattcatggggatcctccagtagagtattggaatgatcttaagagtgcccttaggaagagacacattccctcctactataaaagtgagcttatggacaagctccaaaggcttagacaagggagtatgagtgttgaagaatatagacaacaaatggaactactccttttaagatctagacttagggaggaggaaagaacaagcatagctaggttccttagtgggcttaatatgtaagtgagggataaggttgaactccttccatatagggacctagatgagctagtccaactttgtataagagtggagcaacaacttaaaagaaagccttcttcaaaatcttatggctttcactcttatccaaggaaggactaagcccaacaaattttgggggctgcatcttcaaaacccaaggaagataagggtaagaccatagagaaatccacccctacaactagttcccaagaaaggactagcaacattaaatgcttcaaatgtcttgggaaaggccacattgcctctcaatgccccacaaagaaaacaatgatcatgaggggtcaagacatttatagtagtcaagaggagaaagagtctagtgaggaagtctacccccatgaagaaggtgacctcttaatggttaaaaggctccttggaggtcaatcttgtgatctatctcaatcccaaagagataacatctttcatacaagatgcaaaattttagataaaacttgttctcacattgtggaaagtggatcttgctgcaattgttgtagcacaagattagtttccaaattgaacctcagaatcatttcccacccaaaaccttataaacttcaatggctcaatgagcaaggggaaatgatagttaaccaacaagtgaaggtacctttctccattgggacatataaggatgaagttaattgtgatatagttcccatggaggcaggacatattcttttaggaagactgtggaaatttgataggaagatcatttacgatgacctaactaatgagattacctcacccatcttggcactaaatttgtgttgcatcctcaaacaccttcataggtggccagagatcaactaactatgaaagataagagggatgaggaagaaaaactagaaaaacaaataaaagagttgttggatgagggtttggttcgtaagagcttaaatccttgtgctttgttggtatgttttattccattactttccttaactttttaaatagtgatcaaggccttcccatggatcctaagagaataaaggtcattcttgagtggcctactccaccaagtataagggaaatttggggcttcaatgacttaacaaacttttacaaaaaggtttatcccatatttttctatacttgtagcaccactcattgagttggtgaggaactatgttggatgggttggtgacctggcagcgatcgacgcttttctcgcctatcataaccacaaggaaagcccggttgtcgctatgatagccgacctatatgacaccttcgaccgaagatgtgagaagagcagtacgaggatttccctcatcctttcacaaa

SEQ ID NO: 29823 - DNA, 460 bp, Glycine max
  Clone ID: TF_LIB3242-716-P1-K1-G2
ctttagaaactcttagggctccacctttagcttgatatgtacaacgattagagtctaaagtgcttatagatattaagttcttcttgagtgcggggaacattaccttacatgtgttaatgttcttacaataccatcattcatcttgatcttgaccgtacctttgccagctatactacaagcaccatcattccccatcagaactttgccaccatcaacattttggaatgtggcaaaccagtctctgttaggcgtcatgtggaaagtacatgctgaatcaagaatccagtcatcatcattaacatttgatgagacatatagaacattttcaccgtgtgatttttcggagacaacagctactccaccaaactctgaagtactcactttatctttcttgagctccgggcagttcctttttcaatgcccttccttctgacagttatgacatttgttgttgttctta

SEQ ID NO: 29824 - DNA, 1686 bp, Glycine max
  unsure (1)..(1686): unsure at all n locations
  Clone ID: TF_GmC88487_1
ggcagtttcgtcctttcgatccaattctgtgccctagcaatccaacacgcgcgagtgagtcagtgttattataacggctgcaagaaaagaaccgggccggcgcagtagaaactcgaaaggaatcagtgtttgtgtgtttcgcatattcttctccgttttagatttgagagagaagaagaaagagaaaattggataagatagttttcgttttcggcgaagaattgaaatctgagtgaacgatgggagtcccagcgttctaccgatggctggcggagaagtatccgatggtgattgtggacgcgatcgaagaggaagcggtcgtaatcgacggcgttcaaatccccgtcgatacgagcaacaagaaccctaacaacatcgaatacgataacctctatctcgacatgaatggcatcattcatccttgctttcaccccgaggataggccgtctccgacgtcgtttgatgaggtgtttgagtgcatgttcgactacattgacagactattcgtcatggtgcggccgngggagctgctctatatggctattgacggtgttgcgccgagggcgaaaatgaaccagcaacggtctaggcggtttagggctgcgaaagatgcagctgatgcggctgctgaagaagcaaggttaagggaggaatttgagaaggagggaagaaaacttccttctaaaggagagtcacagacttttgattcaaatgtcattacacctggaactgaatttatggctgttttatcaattgcacttcagtactatgttcatcttaggttgaacaatgaccctggttggcaaaatattaaggttattctttctgatgcaaatgttcctggtgaaggggagcataagattatgtcctatatccgcctgcagagaaatcttaaaggttatgatccaaatacacgacattgcctatatggtttggatgccgatctgattatgttggcattggctacccatgaaattcatttttcaattcttagagagattgtatttactcctggacaagacaagtgcttcctctgtggtcagatgggtcatatggctgcaaactgtgaaggaaaggcaaaaaggaaggcaggagagtttgatgaaaaaggagaggctattgtgacgaaaaagcccttccagttcctaaatatttggactctgagagaatatctggagtatgagatgagaatatctaatcctccttccgagattgattttgattgcattgtggatgattttatcttcatgtgtttttttgtcggcaatgattttctaccacatatgcctacactagagattcgtgagggtgcaattaacttgctgatagcagtatacaagaaggaatttagggaatttggtggttatttaaccaatggaagcacgataaacttgagcagggtggagcacttcattcaggctgttggatcttatgaagataaaatattccagaaaagagctcgattgcatcagcgacaaacagaaagaataaagcgtgaaaaggcacaggcaaggaggggagatgatgctgagcctcaatttcaaccagagtctttagtcgcagtttcacgattccatggttctcgtcttgcttcagctccaactcctcaccatttcaaccttctgggcattataattctcaagcgtctgcatcagttagaaaagacaataaagaaccatttgagag

SEQ ID NO: 29825 - DNA, 858 bp, Glycine max
  Clone ID: TF_GmC419_67
gctccttctaatcccatcccatgtgcttttacttttaatccttttttcaagaaaaagagagcttgttttgtttgtgggaagccaggacattttgctcctcagtgtaggtatagagttatcagaaatggcaatcctcctaaatgatgcaatcctaccccccaagggcattggatagaagactccaagaaaattgggccaaagatgcaagagaaggccctagggttctcatgagtcttagggtagattttgggcccatggatcaaaggttggatccacttcttctttgtaagtattagaatagattttttcttcttttgggtcttgtattttggtcattctagtagtatagggttttaaccttgtattttagggcattttgagtagtctttgtagtagggactttttttttttgtattttcatgtatttttggaatgggggtaagcttagctattatagggggtgtgtagctaagctctaacttctcatctcaaggaggtgagcttagctattagagaggtgtgtgtagttaagctctagcttctttaggaatattctcaaggaggtgtgtgtagttaagctctagcttctttaggaatattctcaaggaggtgagcttagttattagaggggtgtatgtagctaagctctagcttctcaagaaagttttctcaaagaagcttctcaaggaagttttcttaagaaagcttctcaaggaagttacctagtctataaatagaagcatgtgtaagtacttgtggtaactttgaatgaatgagagttcttgtgagacacaactcaaagttcaacttctctcccttttttttccttcaatttcgtgctcccccccggacgcgtgg

SEQ ID NO: 29826 - DNA, 471 bp, Glycine max
  Clone ID: TF_LIB3242-180-Q1-J1-B10
acggctgcgagaaacgacagaaggggatgacaaacattgcagcaaaacttaagaccttgggaatggttgtgaatgagaacttccatgttgagtgtatgctgaaatcattactgtccgagtaaggctcgttccaaatgagttataacaccataaaagataaatggaatgtgcatgaattacacagtatgttagtgcaggaagaaatgaggcttaagaatcaaggaagtcacttagtccattatgtaagccaccaagggaatcaaggagctagaaaaaaatttgtgaagaagcatgataaaggcaaagggccattaaagattaataacaactctaagcaaatccagaagaagacatcaaagagaaataattgccatttttgtgggaaatctggacacttccaaaaggattgcccaaagcgtaagtcttggttcgaaaagaaagggattcctaacaatccaaaccataagccca

SEQ ID NO: 29827 - DNA, 506 bp, Glycine max
  Clone ID: TF_GmC115882_1
tgcctgcgggtcgactctagaatgggaactagtcctacgcaatgtcttggatgactgagaatttgaaagaaagtgagatgcagagtaatcagatagcaaagaggatgagactgaccgcttggatatctttgcattagattgtttaggcaattctatgtcatttctgcttcgtttctttcctacatattccttttttttatgcctatcagtttcccttgctcccgggaatgattcatttctccatggtgcatggtgatgtcgtgaaccagacaacctcctcccatctctctggtgcctcagtgacaacggctccaaatttgactgcagctttgccaaggaatcagattcaaatttattcacatcttcacttttatgcttcttgtctattctattattctgccaaacatccaacctgttatatttcctctgtgaagtatgttcttttggacaatttcgaattttatgaccaggatcaccacatttaagacaaatttgctggaaatttt

SEQ ID NO: 29828 - DNA, 608 bp, Glycine max
  Clone ID: TF_GM433K20.C15.o1.fg
atgacatctgtgaagtatgaggttggaaaattcacaggccaaaatgatttcggcttatggcgatcgaagataagagcattgcttgttcatcagggtcttgaagaagctttacaaggtgaaatcactcttgatgcaaagttggatgaaagggataagaagatcttgatggataaggctcacaatgcaatcatcttgagtcttaaagacaaggtactacgacaagtctcgaaggagaagacaacaactgaaatttggttgaaactagaaggtttatacatgaccaaatctctgaaagacaaccattttgagaaaaagaaatcaaagccgcagtctggaaatagtgaaaatgtacctaatataagatgttaccactgcaaaaaggaaggtcacactcgaagattctgtcctgtaaggcagaatggttgtaattctcatacatcaaatgaaagaggaaatgcaacgatagtccaagatggttatgaatctacagaagctttagtggtaggctctgggaaatctgatggagaatggattatggattctaggtgttttttccatatgacaccaaataagccttggtttgagaagttcactcagctacacggaag

SEQ ID NO: 29829 - DNA, 1345 bp, Glycine max
  Clone ID: TF_GmC419_136
gcaacaacttaaaataaagccttcttcaaaatcttatggctctcactcttatccaaggaaggaccaagcccatggaattttgggggctgcaccttcaaaacccaaggaagataagggtaagaccatagataaatacacccctaagactagttcccaagaaaggactagcaatattgaatgcttcaaatgtcttaggtgaggtcacattgcctctcaatgccccataaagaaaaccatgatcatgaggggtcaagacatttatagtagtcaagaggagactacttcttgctcttcctctagtggaagtgaagatgaagtaaggggtcaagagtctagtgaggaagtctacccccatgaagaaggtgacatcttaatggttagaaggctccttggaggtcaatcttgtgatctatctcaatcccaaagagagaacatctttcatacaagatgcaaaattttagataaaacttgttctctcattgtggaaagaggatcttgttgcaattgttgtagcacaagattagtttccaagttgaacctcactatcattccccacccaaaaccttataaacttcaatggctcaatgagcaagggaaaaggatagttaaccaacaagtgaaggtacctttctccattgggacatataaggatgaagttaattatgatatagttcccatggaggcaggacatattcttttaggaaggccgtggcaatttgataggaaaatcatttataatggcctaactaacgagattaccctcacccatcttggcactaaatttgtgttgcatcctcaaacaccttcacaggtggccaaagatcaactaactatgaaagataagagggatgaggaagaaaaatttgaaaaacaaaagaaaaagaaggatagtaaggccttgtcttcaaaggccagggggaaggaaaaagagggaaaggattcctccaagaagattgttaagaaggaaaatcattttgcaacaaaaggtgatattaaaagagcactgcttcttaaacaatcttcctaccttctcctatcaagggaaacatcccttagcaataccacaattcctacacttgagacgttacccccaaaggtccaagaactcttacatgaatttggtgatatatttcccaaagggatatcccctgggctacctcctttaaggggaatagaacaccaaatagatttagtcccaggagcaagccttcctaataggccaacctataggactaaccctcaggagactaaggagatagagtctcaggttaaagaattgttggagaagggttgggtccaagagagcctaagcccatgtgctgtgctagctgttgttggtgcctaa

SEQ ID NO: 29830 - DNA, 476 bp, Glycine max
  Clone ID: TF_GmC122596_1
ctcacatctagagctagttctgccttactagtggatgcatcagccatcagacataggttggcttcttcctcactgtccttgtcagataaggaatcgttcagctactctcaagtgctcatgaggcttttctttttggaattgaagaatttcttcttcttatccattggcttttcaaggtcagtacattctgacttgaagtgccctcgtttcgtgcacttatagcagatgattggacttttctctttcttgtgcaaggatcttttgtatgatctattgaacctagaggagttcttatttttccaattttttttatctttctggtgatcagacttagctcattatcttctttattagagtcatcatcgttagattctttttctgaagcatacttaacaacaaaggccttggatgatgtctctttgaacacaaagttgcgttttggtctttgatctacaagggatagcaatttccctttc

SEQ ID NO: 29831 - DNA, 566 bp, Glycine max
  Clone ID: TF_GmC109188_1
ggtgggaggtcttggattgttgttggtttggctgaagtattttctaatcttctaagaatgttactaacatcaaatttgttattggtaataaaatccttttgtttaggttttacttccaatgttttcttgagcttttctagaaaatttttcttttcctgggggtcaggtatagaattaattgcttcaaacatgaggtcttgttctcttgttaaagtattgatttttctttcatcctctgtagatgacaattgatcatcttgttgaattagattgagattttcatcagagatcatggaggatgaagtttttgtttcttcttcctccgaactttctatgagcaaattattaatttgctcttcaatggctggttctaaattaagatttcttaattttctttttaacctataatatttgctaatgtgaccttgttttccacagttatagcatgttactttagattttagtttttggtttggggtttctatttctttactaattgaaggcttgtgccagtatctccttcctggaaatatctttttggtaaccaccttattttatggcctttt

SEQ ID NO: 29832 - DNA, 2265 bp, Glycine max
  Clone ID: TF_GmC147665_1
gaccgcctaccttaaaaataatgataaaaaaaatcgtaaataaagttcatacatcattactcaggcaatccattctatattccgagggactgcgaccaaattgtctcaactattatcatcaactgaattcaaaaatttgggggccaattcccgtgttgaacttactactccactatcttaattctaacttctgcaaggagtaaactgaggcattatcccaactagtccccacgtaaaaaagaaatacaaaatggattcaaaaacccaacaaggtctgaaataatattaccgtttatgttacataagagaacttgaaataaaaaaaaaaaaaaaattgggcaccatgctaccagacatgatataaaatcatcaaaacttaggccgctaaggaaccgagatccagaactatatacatgagcacgagtacttgtgtaaattgacttggagtgatccgaaagaccatccctgctcacatattaaacctcggcaagagctctcttcgagcttccactgctgttctattgatagccccattgactgcaagcacctttggatcaattccatgaccattttgaggacagttatagctgaagtgtccatgtccataacagagtaagcacttagcaaaccttcctccccctgcttgagacacatcgcattttccaagggaatgtccaatttccccacaaaagaagcaaacttcctcatccatggaaagacatttcagccgctggcattgttggaatctatgaccaggctgtcggcatgcccggcatctcaaggaactttcaccatgatgtttaaagggggatttagtcactctgagagtgtcagtaatctgaaccagggttttaccagctggctcaacattgcatctgcccatagaattttcagttgtggatccttcagttttttgaactggggtttctgcaattcgatcagcattgtgtttctcagattctaacccttcattttttgcactgttccttttcttcttcctctttttcttggtcatcggttcagggtctactggggttgctgggtctactggaggagtttggcttgctggaattgttgggtctattgagggttctgctataggatgtatagatctttgaactggggttccaggtggcttgtcatcatgttcatcaggttctgctcctttgcttataagggcacttctctttctcattttcttcctcatcttctgaccttgatctattgggggagctgggactgggattgttgggtctattgaggttgttactgtaggatatgcaaatttttgaactagggtttcaggtggcttgacaccgtgttcattggtttctgtcccttcaattatgatcacaatcctctttttcttcttcctctttttcttggtcatctgctgaccttggtctattggggtttctgtgtcaacagggggagatgggcccactgggtcgattgagggtgcatctgtatggtatatagatttctgaacaggggcctcaggcggagcagcttcaggcagcttgtagtgttcattgagttctgccgcttcactttcaagcttactcttccttttcttctttttctttgacatctcctgttcagggcctgttgagattgcaaggcaagggtccattggaattgctgggtctattggggatgcttctataaggcatgtagatgtctgaattgagatttctggcagctctgtagaagttgtcttcttcctttgcttcttctttatcttcttcatcgtcagttctaggtctattggggttgctggatccaccaggattgtttggtccatcaaggatgctggttgtaggcttattggggttgcttggtcttgttggacctggtctggggcctggttgagggttatgtccatatgcaatgggctcccttggttctccacctcttctgagcatattattattggttctttttctctcttgcttttttggtttcttcttctctgatcaattggagttgctggatcacccggaggctctgcacatggcgcagagcaaggttgaggttgagggggttgagcacgtgcatcagggttttggacaggttctacctcttttttcttttctgagtttgttggagctggcaggtctattggggatgctaatttaggtttagaacatgcctgatcctcaaccttagcttcagttggttctgcccttttgttcacttgtgaattattagggattgctatgtcagatgggagtgccaatttaggtttagggcacactgcagagt

SEQ ID NO: 29833 - DNA, 541 bp, Glycine max
  Clone ID: TF_jC-gmX3043001A11sg10F7a1
taatatccgcggtgtaccatgtgaacttatttacagtatttcattataggaacttatatcatcaagcatgtaaagattatcaatgaaagaaccataaccaaccatgtttgaattttggtagagactaactttattatttccaaatgaacaagaaaattcaaatttgtccaaactagaaatagaaataaaattccatctaaaagacggtacaacaaaagtctcaaataaatccaaataaaatcaagtttttaactgtaatctaaaagttctaatagcttccactgcaacctttttgccatcacccacaaagatgaatctttaatcatcacttggcagtcgactccacaggcaaccctttcttcacacgccatgcggcatacttggaacactctttcttcatgtgtcccaacttcttgcagaagtaacaggtaaattcctcatccttattttgcttcttttgctgagaagtcccttccgcagcacccttagtcttctttcttttcttattctgagaggtcgaaagtaagtgagctttttcagt

SEQ ID NO: 29834 - DNA, 580 bp, Glycine max
  Clone ID: TF_LIB4203-002-R1-K1-B10
cggtaaggagtgggaaatacccaagtaccagcaagtgcttcagcccattgttcctctagaagggcaagagatgcaagtgaaggcaaaaaggccaaagcctcactgtgtcaactgtggttctgaagagcatcagatgaaggaatgcccaatgcctcggaatgctgctcggatcactgagaagaggaaagagtacatggatgcctgtggcgaggccagcggccaaagcttccagcagcgctatcatgccgaagaagtagaagagagatttggaagattcaagccatgagttattagtgaggaacttcaagatgcactgggtgtgacagacaagagtgttgcccctttgatctaccgaatgcgccaggtaagctacccaccgggctgggtgaagggggctgaactggagaatggtgggctggggctgtgtgggtggagacggtgacgctggtggggaaacgggggctgggggaaatgcggggtgggggtggggcctgcggtggggtgggggtggggggggctgtggggggggggggtggggtgggctgggggggggggttggggcgtggaggggggggtgggg

SEQ ID NO: 29835 - DNA, 828 bp, Glycine max
  unsure (1)..(828): unsure at all n locations
  Clone ID: TF_GmC147156_1
acgcaagagtacaaatgcaatgaaatgcattagatttcatgcaacaaaatttataagttgcgcatataaaacataacccagtggtgttcaaagaaaaatttgggcatatctaaagcaccagtacaaatgtaatggaagtcatcaaatctcatggtacaaagtttaaaagttgcagatataatacataacctagtagtgttcagagaaaattggtacacaaaggatgcctttcaaatttcccctctgtaacctccagatccaaaataatcctttctattatttgctatcgccatgctcttctgatgttctaatttgggacaatcacggatacgatgaccaagcccaccacaatatgcacatcctttgaccccacttatgtctgtgatctcttcattatcttccattggatcattcaactcagccaaaactgggggaatcctttgctttgcttcttgcaagaggtgtttcaagtcaagtaatgttgtctcactttgattcttgtttataaatgttgtcgctataccagtctttccacatcgtccagtccttccaatcctatggacataattttcaatttcagctggcatatcatagttaatgacatgctgaatatcaggaaaatccaaacctttggatgcaacatcagttgctaccaacacatctttctttccagccttaaaagcagcaatggcatactctctctcttcctgatccttgcctccatggatggccactgcttccactcctttcaagagaaggtattcatggatgtcatcaacgtcagccttattctcacaaaatatcacggacgcaggtggggttttttcn

SEQ ID NO: 29836 - DNA, 928 bp, Glycine max
  Clone ID: TF_GmC80348_2
ctattatatattcttcagatgaaatctcggcaccagcttgtgaggtgttggaccaccattccatgatttcttcctcaagaaaatcatgattggatatatactgactttcgaccatacacttgatactccccactttcactgagagagattttcttgtattctgctctgaacactgtctctgggactgggtctttcaagatgtcggtgcgggacaattgaagcttttttactgcttcaaatatttcctttggcacctgtgaaatctgcctttcagccaatttggatggagataatgtaggattttctctgaatttgttttcctctgaactcaaaccacggtatttcttgaatgatgcattgcaccctaccttatgggttataatttcatttgatttccacttcaaattaatattttgacctgctcgttgatctgtttcatcattaatagaaccgccagataaaactcggtcatcctcatcagtcaacagcctggcactctcttcattgcttgggattaaatgtttttgttttccacaatcattgaccaaggcattagctttcagttcatgtttcctagttgagattgaagtgggacatgaaattgcccaatggttgggctgaaagcatttgatgcatagacaagaatgttcttccagtcctccatatgaatctatattcttctggagatcttctagcttgttttctgcaatagccgagcaatcagagagttgatgtccttttgttccacaaaacaagcacaacatatttacctgtgtggtagtatctgttgcatttgttggtatgatatgtttgatggcactaaatctccttgcaaacattgaagccattggctctaaatttctgagccctggggaagatgaaaggggtttgaacatatacattgatttatgatcattatttcccttat

SEQ ID NO: 29837 - DNA, 1203 bp, Glycine max
  Clone ID: TF_GmC261618_1
ccacgcgtccgctgttactctcctatataagggagttagttagaaggttgaaatacgacgagagtgctaaatctatacactctaatttcattgttctgatctttaataagaacgatacttctttacttgtgtgttacgattatctattttctttttccctaatctgaattcgtctttcttagtcttaaactcaacaaattagtatctaaagctttagttcaaataatttcacatcgattttgtggtgggtcttaatcatcagagatcaaccattatattttttttccatgcttagtcttcaagatttgatcaagaagatggttaacataatcaagattgagaaattcacaaggaagaacaacttcaacctttagcgcatgaagatgtgtgccttgttgaaagaacaagggatctgggcacctctctctggccaatagacaaagattgataagtccattcttgagcaacaagaagaaaaaatgcattcgctaattcttttgtcattgtttgatgaagttctttacaaagtttctaaggagaaaattgcttttgtgttatggctcaagttgtagaaactcttcatgacaaaatcaatctgcaacaagttgctactgaaacaacatttgtttggcctctattagaaggaaggcaaacctctggaagaccatctcgatgagttgaactctgttttgttttagctctgtgacattgatgtcaagttagaagatgaagatcttgcaatgattctattagcctttcccccaattcatatgagaattttgtgaattctcatagtgttggaaaagattgcatcacacttgaggaagtcaagtttagtctctattcaagagagcttcatcacatagcttttggaaaatggtgatgaagcctctacctttggattatcagtaaccaatactacaaaagggtagaaaaagaagaaaggcaaaggattcaagaaagggaaagttaatccaaatgatatctataataattgcaaaaaacctggtcattggaagaaagattgtcccaagaaaatcaagaaagattatattacagttgttgttcgaagtgattcctcatcagaagatgatttggtactctcaagtgttaatcaacaataacatcactctaaacaatgggtgttggactcgggttgttcttatcatatgagtccacaccgaatctggtccatgacctatg

SEQ ID NO: 29838 - DNA, 2265 bp, Glycine max
  Clone ID: TF_GmC9855_2
gaagcgcgaactcggctcgaggtggctctgtagatttagatggatattttactgtatactatcctttcaatttaaccctttctttctccgctccgaacgcggaaagtcccttccttttcaatttccccaatcttttgaaatcattcttcgaaccctaaaaacatctttcaccgattttcattttccctttgcaaattcaccgattaaatgtaattaatttgcgacgatgccttagccaatatggcgtgtgaaatgtaacatgctaatattgttattttttttagcaagttcctagcagcttatgctatctgatgctttcctgggagtctcccttcctaaaattgttcttgtgtaattttttgttttttggcttaggtctagtctatttaaaaaaatatccagaaaaaaaatataactatttatttttattaaaaaatctttttgagtttaaacactcttaaaaaaacaaataaaatttaaacaaatgtgcgtgacagatatcaattttcccatattattcacagaaaggaaaaaagggccctataaaactaaacgctccccttctcgaagaggccgctcgctctgtttcttttttgttctcaatgcaccgcatgagtttcttcagagagctcgtcttctagggtttttctttctctcttctcactgcatcgcttcaggttcttctgaaaagatgtctcgcgtgtatgttggtaacttggattcacgagtcaccgagagagatctcgaagacgaattccgcgttttcggagttattcggagtgtttgggttgcacgtagaccacctggttatgcttttattgactttgatgaccgcagagatgcacaggatgctatccgtgaattggatggcaagaatggttggagggttgagctttctcacaactctagaggtggaggtggtggtcgtggttggtcgctctgggtggttctgatttgaaatgttacgagtgtggtgaacctggtcattttgctcggtgaatgccgcatgcgtggtggttctatcaggagccgtagccgtagtccgcccagattccgtaggagcccaagttatgggcgaaggagttacagtcctcgtgggcggtcccctaggcaccgcagtttgtcacctcgtggacgtagctacagcaggtctcctccttatcgtgggcgtgaggaggttccttatgctaatggaaatggccttagggaacgacgcagaagcagaagttgattttgagagtttggtattgggtatctgtgattgttaagagaatagtgagattttgttaatttagtggtgctttgactgaagtatgagtctgttttgttgggcaaggccctgagtttctactcttggattggaatagttagtttattttatgtctcagcttgtgttgaatttatctttgcttgtagtttcattgcaggtaatgatcttgttaaggttgttgttactagtttgttaaatatagttccagatctttctgcactacattaatatgcttcacaatcctagttacaatgataaacttgaagtaatgcaaaacgacattagttttagggcagtcttggataaattaaaggtagatagcaaaaatggttggaagcttaataatcctaaagttaataagcgctgaggtcgtagtgggcttgctccagaagaagtcatttcattgattatggccaatcctggggttgctatggcatttcaaaatcctagagttcaagcagctatcttggaatgaccacataccccaacgataaggaggtaatggatgtcttcaacaaaagatcagaacgcttccctggagtagtttgacctcgacgcagtagtgtgttgttgttgtttcctgggtgtagttatgcatccttttcctgatgacctaggaccttattagctccggcctatccacacggaaccatgcaaaactctcgtgtgctcatatactgcaggctcgcagttacggctccggatagtaactgtcttccctgggctaaaataatgccaaagttggatgtttcgtttccctaaagatagattagtgtctctgttgggatgttttgtgttttcattaaagattttgtttggggcattgttgttgcaggttggcttttgagttttcgggtggccctaaaaatgtgaatgctgcacataagtggagtattgcggtgcattaaacttgtcatggctgcgtccaattaggtcgcaacggtcaaatagtcatagtgaaccgtgtaatcaaagggatattcgttgtagtagtt

SEQ ID NO: 29839 - DNA, 272 bp, Glycine max
  Clone ID: TF_GmC127329_1
cggctcgagtacggctgcgagaagacgacagaagggcccctttttgtctacagttgaaataggtcgtgcctttatcagcacaatttgagatgtgccctggcttaccacacttgtaacaagtgatctaagttaagaaagtagtgggtttgctaccattaccaccagcaaactccatagcaatagtcctttgattgttggggtgattaccaaattgcttacttttggttgagtacggtttcccccgatgttgaggtctattattgtttttttta

SEQ ID NO: 29840 - DNA, 1233 bp, Glycine max
  Clone ID: TF_GmC174_6
gtttcgggagaaaaagcaatccactcagaggacccttttaattgttcaccgggttgaagttcaaaattgatcagctagaagaattcaacaatgcctcgctatgatgataaatacggcaatacccgcctctatgtgggacacttgtcttcgaggactcgttcccgtgatctggagcgtgcctttagcagatatggaagagttcgaggtgtggatatgaagaatgatttcgcttttgttgattttagtgatcctcgagatgctgatgatgcaagatataacctggatggtcgtgaagttgaaggaaggcacgttactgtggaatttgccaaggggggtcctcgtggttcctgggaatcctcaggtcagggtcagggtccacctactggacctggacgatgttttgactgtggcttgatggtcattgggcccgagattgcaaaactggggatgggaagaacaagtgtttccttagtggggaaagaggtcatatagaaaagaactgtaagaacagtcccaaaaagttgagacatggatgaagtctttcaggtcacattctgctcatcatggcagaagaagggatcgaagctacagccgagaccgcagctacagtcgatcaatatctcctgtcggaagagaacgaagcccagtttctgaagatagatcagagtcctcaaccctcctagataagaaagcatagtgcatcacttgaccaaagcagtccacagaagagaggtgtcacatctcctggcagtgataggttggccacccggcaagatgggtctgactacagtggtggtcctagaaagaaaagtaggagccctgcaagggactgtgatgagggcggctatgatagccctaaagttaatgggcatagccgtagccttagggatgatgacaagagccccattgatgaagatgatgacaaccaccgtcgctcactgtcaccttgaaaagcactttctgataaaatggggtcaggatgtgacccagtttgtatctgctttgtatataaaatgcactccagcttaattctgtgacaattgtttatgaaaacggttttgtgtatggtatttttcagattcttgctggtcaaaaaaaaaaaaaaaaaaaaaaaaaaaaaaaaaaaaaaaaaaaaaaaaaaaaaaaaaaaaaaaaaaaaaaaaaaaaaaaaaaaaaaaaaaaaaaaaaaaaaaaaaaaaaaaaaaaaaaaaaaaaaaaaaaaaaaaagggggg

SEQ ID NO: 29841 - DNA, 1016 bp, Glycine max
  Clone ID: TF_GmC25809_2
gcggctgcgctgctgctaatagcgcgttgcatctgctacctatatacatattttcgccaaaccgccgattccgttgagcgtttctaccgtagcgctcagccgtgacaatctgtgcaagaactgcaagagacctggtcattatgcaagagaatgccctaatgtcgcaatttgccacaactgtggcctccctgggcatattgcttctgaatgtacgacaaagtcactgtgctggaactgtaaagaacctggccacatggccagcagttgtccaaatgagggtatttgccacacctgtggtaaagctggacaccgtgctagggaatgctcagcccctccaatgcctccaggggacttaaggttgtgcaacaactgttataagcaggggcacattgcagctgaatgtacgaatgagaaggcatgcaacaactgtaggaagacaggccacttggcacgtgattgtcctaatgatccaatttgtaatttgtgcaatgtttctgggcatgtggctagacagtgtccgaaagccaatgttcttggagatcgcagcggtggtggcggtggtgctcgtggtggtggcggtggtggctatagagatgttgtttgcaggaactgccagcaattaggtcacatgagtagggattgcatgggccccttgatgatttgccacaattgtggaggtcgtggtcacctggcatatgagtgcccttcgggtcggtttatggaccgctaccccaggaggtactgatgatgggaaatttatgcgttaccagttatatggatgtttttctatgatttctttgccgaggacagattgttgagtcttggtagtgtatgtgtttggctttattatttttaactttctagagtcatgacaatgatgccaatttatcggcaatttatagtttatgatatcgtgcttgtgctaggaataagaatttgctactgttaaaacatgttattgtatgcagatgtctggtgagactattttttattggttcagtgcaaaaaaaacaaaa

SEQ ID NO: 29842 - DNA, 2985 bp, Glycine max
  Clone ID: TF_GmC10165_1
gtacaaaattcccgaatcggcgcggggccatacattcccaaagaagaacgtggcctctctgctaaaccccttatcgtctccaaaaatggcttcttctatcataggcgtttcctccatttaccaaacaccccctctcgaactataccagaggccaagcactgcttccacttcctccgttaggttgcaatctttagactccaagtctcacttcaacaacctcctccgagcccaccgccactccactggcccgggcctcaagcctacaccatctttcgtcccctccgccgtcgccacccccaactcctccctcctcagcgaagaagccttcaaaggacttgcccgcgaattcgaccaaaacgacgaccaattcacccgcgcctcctccgccgccgaatccgttaaccccgacgaactcgacatttccaagctcgacttgccctcgcgtctcgttgagtctctccggagccgtgggattactcaacttttccccattcagagagcgttgttagtacctgcactagagtgtagagatatcattgcgcgagcgaagaccggtcatccggaaagacattagcgttcgggattcaaattattaaaggcctcactgaagatgagcacgcaccttctgaccggaagcctggtgagcttccgggagcttgggtgcttgctcctactagagagttggcgaggcaagtggagaaagagataaaagactctgcaccttaccttagcactctgggttggtctacattgcattcgtctggagctccagatactgcgctttggtgcggtgctgccggggcggtcagggcgcctcgttgagttgttgactcgctagacgcgaacggccttaggctcagtgaggttcaatatttggttcttgatgaagcggatccagatgcttgctgtggggtttgaggaagaggtggaaatgattctggcaactcttccatatcagaggcagagcatgcctttctctgccaccatgcccagtagggtgaagaagtaagcgataaaaaattggaacaatccgctaaaaattgatgtggtcggagaggatcaggaaaagcgagctgaaggggtaagactcaaggctacagaagcggctcccacgtaaaaaaattgataacatcacacagcattagtatgtatcagcaacaagggtcagatccaacaaagcaatcaccggcaaccggttttccggtgagctatagcaattcaacaacgtattcgaccaacgaggcttcctacgctccagtcccacctccccagcccaaacctcttgtcgattggtccaccggcctctgtgactgcttctccgaatgtggaaactgttgcatgacgtgttggtgtccatgtgttacctttggccgagttgcagaaattgttgacaagggatccacatcatgtggtgctagtggggctctgtatacgctgatttgctgtgtcattggctgtggctgcctatactcttgcttctaccgccccaagatgagacgacagtatggtctaaagggaaatggttgttcggattgcttgattcattgcttctgcgagccctgcgccctctgtcaagaatatcgtgagcttcaacaccgtggatttgacatgattattgggtggcatggaaatgtcgagcaacgaagtcggggagtagccatgactgctacaacagctccatcagtcgaaaatggcatgagccgttgaatagtatgcagttctgtaactaaaacagtttaaccatgaagaattagaaagatctgaagaatagtaattttttctgtaaggttcattttttatattcgatgctcttattaaaattgaagttttaatactttttaataatagtccattttattttttaacttttcttttcaacttatgtgttaccatttatattattgatgctctatttcaattatagatactgtattacttagtatgtttttcagcacctagaaaaactcgttttgaaaaaatccaaactaccctctttttatattaatgagcgtctaaaagttttttatttgagattctctgacatagatagaagtagccgaagaggttctacttctaggggaggttttagttctaggggaggttccgcttctagggaccggagaggttttaaatcctcacggggctgggatgtggaagactccggtgatgactttggtgatcaatccagtaggagaggtggtagaaattttaaaactggcaacagctggtctcgagcagcaggtaaaagcagtggcgatgattggctaattggaggtggtagacgatcaagcaggccttcatcatcagacagatttggagggacctgttttaattgcggggaatctgggcatcgtgcatcagattgtccaaacgtttcaaacagacgaagctttttttaagttcccacatatatatgtttgggcaccacttttgtccaaacgtttcaagacgtgagctgctgccactgtttttgacctaatgggttccggaaaattgaaagatgcttcccaaaacagttacagaatcaattttaatttgcatctctcgtgttggcgtgatctccaaagggacctctgtttttcgtggagtctcaatgaaatttagtatttgttttgggaagtggtattggataaagaatagcgttaacagtatgattatgttatcttatttttggggtgagtttgggggattgtatgggcctgtattctatttaaccatgttactagtatttaatatctttctgaaccttcctggtttaggaacagacaggaaaaatgaatgaaagatgaaatcccaaaggtttatgcagaagattcatttacattcactttttctgcgtcatatttaaacttttccgaatgtggaaactgtagcatgacgtgttggggtccatgtgtaacctttggcccagctgcagaaagtgctgacaagggatccacatgcctgaatactgttttctatatcagatcagaacatacctagaag

SEQ ID NO: 29843 - DNA, 685 bp, Glycine max
  Clone ID: TF_LIB4390-027-Q1-N1-B2
gaaggataaaaatttaatttttatatacattttgtgatttttttaacatttaaatatgacgcagaaaaagtgaatgtaaatgaatcttctgcataaacctttgggatttcatctttcattcatttttcctgtctgttcctaaaccaggaaggttcagaaagatattaaatactagtaacatggttaaatagaatacaggcccatacaatcccccaaactcaccccaaaaataagataacataatcatactgttaacgctattctttatccaataccacttcccaaaacaaatactaaatttcattgagactccacgaaaaacagaggtccctttggagatcacgccaacacgagagatgcaaattaaaattgattctgtaactgttttgggaagcatctttcaattttccggaacccattaggtcaaaaacagtggcagcagctcacgtcttgaaacgtttggacaaaagtggtgcccaaacatatatatgtgggaacttaaaaaaagcttcgtctgtttgaaacgtttggacaatctgatgcacgatgcccagattccccgcaattaaaacaggtccctccaaatctgtctgatgatgaaggcctgcttgatcgtctaccacctccaattagccaatcatcgccactgcttttacctgctgctcgagaccagctgttgccagtt

SEQ ID NO: 29844 - DNA, 5146 bp, Glycine max
  Clone ID: TF_GmC2654_4
tcatgtgtataatagagctcagaggcagcaatccatggatgagtccaatatctcaagagggcagcggttttctccaatgtagattccaaaagctcggctggttctgacccttcaatcaacttctataggccacttcacttgcacaagagttcagttatgacacgttgaaacggataaggctcagcttcacggtgtgatgtgaatctggtggaagctcaatatctccgtgtactgaatagtaccattcttgtccaagaagttcagcatcttgttgttccatgcaatttacattgagttagctagctagaagtagctgttacatgtctggtgtaataaatgtcaggtgttgattatcacttcatttgcatgtcaattaccactccctcattttcaagtctccaatttgcacatccctcacaatgcaagtccacaagcacacatggtaaggtggtttaggctccttcttctagcctgtgtccctatccttcataagcatatcaaagtcaagtctcagattcttaaatccactaaacttaatgcttatatagttagtttttatcttatttgaaataaataaatcacataccttttgagatacttaagatgatgtgttccaatctctacatgttgagcttgctaccttgacttcgccaactagtgcagtttaattcaagaaaatgatgagtcaaattgctgtaagttaagaacaccgtgtattcctgttaattgttgttatcatgaaagtttctatgatgtagcatgggttagacgttccatgtgtgtggagttgcggatttggtatctatgagctgccaatgcttggaatgccagtttatttatcagctgttcataaagcgactatttgatatttcatttttgaatttacaatgcagctctgttcttttgacaccgaaaagctcttacctgctctgagattggtttccttgtcaattgtggagtaataatcttccccattggttacattcactggtgccgcgtatctttcaaacattgtggggacttcagtatctgttgctcccatttccattgtttcatttacaaatttgatgactctatacaacaagtgctaatgcacgaaaatatgattatttgaagttgtagtatgctgaccctcattctcagctacagcaggcctattttttttcttttcattcctgagttattctgtcgcccctgagttcttcagttgtgacccctccacactcttcataggagctagcttttgtttatgatcaatgggagttcttacccgcgaacaatctataaaattaaatttctccaatatcttctcaatataatgtgattgagaaatgaaaattaagatgtgttcacgtttgatctttattcctaagatcacagcagcctgccccatttcttgcatatcaaacgtagaagaaaaaaatgtcttagtttcatcaacttgatgctgatcgataccaaagatcaagtgatcgtctacacacagacaaatgataactcctttgcaatgagtatcaaacttgctatatagacatttatctgcttggtttagaacataatcactagacaacacaacctcatcaaatttttgatgccattgattaggcgcttgtttcaagccataaagagatttcatcagtttacacaccttattttcatttcctggcataacaaacccttcaggttgtttcatgtatatctcttcatccaattcaccatttaagaatgcagttttcacatccatttggtgaatcaacagattgtggatagcagcaagtgctaacaacagtctaatagtggatatcctagcaacaggagcatatgtatcgaaaaaatcaataccctctttttgcctaaagccttggataaccaatctggctttgtacttgtcaacagtaccatccactttcatctttctcctaaagatcatcttacatcctaatggcttacatccaggaggtaagtcaaccaatttccaggtattattttgcatgatggaatccatctcactttggattgcttctttccagaatacagcatcccttgaagccattgcttcactaaaggtctttgggtcttcctcaacattaaggcaatattgatattgaaattcaatatcattccttgacccttcaaccaaatagagttgaaagtcatcaccaaatgacttagcttttcttactctcgtactctttctagtttcagtactagttaaaggtatatcctcaatattaactgagactttcgacatggaattcatgtcctttggcctaggtatagatgtaaacctttgttcatcaaagatagcatcccgtgactctataaccgagttcacagcaacagaatcattagattctagcacatagaatctatatgctttagaatgttcagcatatccaataaatatgcaatctatacctctttcacctatggttttccttttaggttctgtaagcctgactacagccctacatccccaaattttgagataactcaaatttggtgtctttttgtgccaaagttcatatggggtaaccttattccttctgttaggaattcggttcaacaagtaacaggctgtcagcatagcctcaccccaaaatccttcacttaaacccgaataggataacatggaattcaccatttctttcaaggttctattcttcctttcggctacaccattctgttgtggtgtatagggagctgtagtttgatgtattattccagtagattgaaaataaaccggatcataatactcacctcccctatccgtacgaagagttttgattagcccattttgatgaagttctacctctttcttataaattttaaatttatcaagagcttcatcttttgtatttaataaatatgcataacaataccttgatgcatcatcaataaaagtaacaagatattttttatgacctaatgatggagtagcatgcaaatcacacaaatcactatgaataaggtctaagactttagtctcacttttaacatccttaaaaggtttcctagtgatcttggtcaacatgcaagttttgcatttttcaatgttcatatcaaaaggaggaatcatacttgtttttgacatatcttttaatcttttgtaatgaacatgtcctaatctagcatgccaaatttctgattttgtcatattagttatagaactacacgaggccatacaaacagattcatgaacaaaaggaacatcaatgtttaatttaaacattccattacaacgataaccaaatccaacaaacgaaccatgtcttgacaagatgtacttgtcactttcaagtacttgcttgaaaccacaattatttaaaaccataccagacaataagttcttacgaataccaggtacaaataagacattatccaaatacaaactttttccggaagtaaaaactaaattcacacaacctaatcctaggattggttcagttgcaacattgcccatcttcacaatagagccatcatcgattggtctaaattccttgaaccaacgacgatctttgcacacatggcttgttgctcccgaatcaaaccaccaagcaacgtcatcatcctgcacatagaatgcattagatattagtgatacataatttgaattcgtattcgaattaaaattattcactacaatctgaccttgtcgcttttcaggatcattagacccacttggaccagccttgttctttcctttgaacacccggcaatccctctttaaatgaccaggtttcccacacttccaacatgacaattttgtctgtttgtttggacctttgttcttatttccttgaaattttcgtttgttacctttagcattgtaattttgcttaactgttccactttcctctaccatattaacggaagaggaacctgctacggttttatcattgactttgtcaatttcctgagccctcagcgactcctcaatcatgaaatgactaccgagttgaaccagagtcaactcttccttcttatgtttcaaggtatgcttgaagtctttccaagaagaaggcagtttatcaattatagatgaaactgcaatggattcatccattttcaaatcatgttgagtaaactgacccaaaatccgcagcagttcattatattgctccataacaggcctcgaatcactcattttgtaattaaagaaattactaactaagaatttgttacttgaggcatcttctgccatatacttggattcaagagagtcccataattccttagcagactcaatattttgataaatatcaaagagagagtcagacataccgttcagaatgtgtccacgacaaatgtaatcgtcgttctcccatttcgaacgcttccttgtttgatccagagtttcgtcttccatatataccggcatcggtgtgctcagcacatacaccactttctcttgacaacattgaaagtggatcttcttctgccatcttctgaaatcctgcccttcaaacttgtccaacttcgcaaacttgcttgtcatcttcgaactatcgttcgtcatctcgaaagatttgattcaatcttttgttggttaattttgaaaatcgagataatcctggataaatctgaagtcgtgtataaacactttcagattgaatcaaatttcggggttcaaccaaaattgttcaatcggataaaatcagaagattataattcaagagttttgttttggtcttgtgagtttttcacatgttatgctttctgaaccaggatgattatttataatcaaagaacaggtggtttttggcggttgatggaagttatttatttttaaaaatgccgttgatggaagttttaggtaacttccatgtaacttccaaccgttgatggaagttagtaacttccatgtaacttccaacctttgcctaaaccgaacatctcgttattacattaaaacaagcgtgcactcttattttaacataataaagagatcaattacactaaaatgtccaacactcccccattttagtgtaattaccgatcaaatcaccaaagtcataacataccacaaactactgcatagatgaaatatcgtgacgattgaatttcatcttagcaaattacacgtttcaaatattcgaatatcagggtgtcactaaggattgcccttctgtcgtcttctcgccga

SEQ ID NO: 29845 - DNA, 719 bp, Glycine max
  Clone ID: TF_LIB4391-053-R1-K1-G3
ccccgcgtccgcggacgcgtgggttctacttaaatgcattggttaaggaagccaaagaagattgaagtatgcttttactagaagaggctttgaatctttattaagctgtttataaaaccctaagtatgaccaatttattttctgttcttgtggtttgcaatcttcttactctggctgctgctatgattagtttgaaacttaagtgatgtgctttgcctctcaaacagagcgggtgcatttactcaaagccatctgacttttggaacatgagcatgcatttcttacaatggcaacacttaggtttttttgtcagccgtgacaatctgtgcaagaactgcaagagacctggtcattatgcaagagaatgccctaatgtcgcaatttgccacaactgtggcctccctgggcatattgcttctgaatgtacgacaaagtcactgtgctggaactgtaaagaacctggccacatggccagcagttgtccaaatgagggtatttgccacctgtggtaaagctggacaccgtgctagggaatgctcagcccctccaatgcctccaggggacttaaggttgtgcaacaactgttataagcaggggcacattgcagctgaatgtacgaatgagaaggcatgcaacaactgtaggaagacaggccacttggcacgtgattgtcctaatgatccaatttgtaatttgtgcaatgtttctgggcatgtggc

SEQ ID NO: 29846 - DNA, 798 bp, Glycine max
  unsure (1)..(798): unsure at all n locations
  Clone ID: TF_GmC111765_1
ggagtctnnnncacacgtttgcgcattgaggaagaggcatgcagacaagatcagaaagatgaagtgttggttgtgtctgacaacaacaataaaaggaagaacacaggtgcagttctgaagcctactggctaaaactttaagaatcagaaccgcaatgtgaacaatacctccaaccgcaacaagaaccccacaagggtccaacatgctagacaacatccacctgccaagaataatcctggtgaaccattcctctgctacaattgtggcaaaccaggacatatggcacgtaaatgcagaaatccttcaatgacaggtgctccccagtctaacatgactcaagaaccatacatagctgtgataactgagatcaatatgattggaggatcagatggatggtgggtagacactggcgcctcccgccatgtttgctatgatcgtgctatgtttaaaacatacacgaatgttgaaaataagaaagtgctgctgggtgattcccacaccactactgttgctggaactagagatgttgaactgaagtttacctctggaaagactttgatcctcaaagatgtgatgcatactccagagatgagaaagaatctggtttctggttttcttttaaacaaggctgggtttacttagaccataggtgtagatttatttactttgaccaagaatggaatatttgtaaggaaagggtacgccactgatggcatgttcaaattgaatcttgatattaataaagtttctccttctgctttcttgctatgtgattttaatatctggcattatagagtc

SEQ ID NO: 29847 - DNA, 1437 bp, Glycine max
  Clone ID: TF_GmC17809_1
cacgcgtgcgtctcgagcggcacagttcctcatatgggctgcgagaagtcgacagaagggggtgagcgttatcgtggagttcaacttcgagggtttccttcacaactctgtaatttctaattccacagttactcttgtgttttagcgagattcggagtgagtgatggctgggaaggaagagaatcgaatatttgttggaggtttatcttgggaagttacggagcgtcaactcgagcatgcctttgctcgttacggcaaaattctcgaatgccagatcatgatggaaagggatacaggccgtccacgtggatttgggtttatcacatttgcagaccgtaggggaatggaggatgcaatcaaggaaatgcatggacgggaaattggtgatcgtatcatctcagtcaacaaagcacagcccaagatggggggtgatgatgcagaccaaggttacagaggtggctactcatcaggtggtaggggaagctatggtgctggagatagggtaggacaggatgactgcttcaaatgtgggcgtccagggcattgggcccgagattgtcctttggcaggaggtggtcgtggtcggggtggtagctcatttccttcacgtcctaggtttggagctgctggtggacatggggatcgtctaggtggtgaacgtgatcgatacgttgatgatcggtatgagggaggacgttatggagatagggatcgttttgacaaccgtgactacaaatatggcagccgtgatcgctatgctagtgacaggtatccaaccagtggagatcgattcgcaagtgatcgatatggcggtggctcagattacccgcaaaatggttatggcaaggaaagagggtatgaccggtatggtggtccacgaggaggtgctgataggtatggaagtggaatgggaggtcgtgatgaaggaaggagttataggggtagacctggtccatatgaccgcccaagcaggggttctcgttcatcacttgatcgctactgatttctaacgctgatgtttttaacgggaaatccaaatgcagaagccacattagagacctagttcttgttcttgttgttacgtaggacatcctgtttgggacaactgttgctgctagattgtagtttcatagattatggatttcgtagtttgtttccctatttatagatcgtgccaatccctgttgattttccccctcctttgcctgacgctttgactaacttccctaatgcaagtaagcatgatttaccgctgcattccgaaataaaaaaaaaaaaaaaaaaaaaaaaaatgaaaaaactaatttcaaagacaggtataaatgttcgcctaggaagagtacaccggtgcaagtgacatgtgttaattgaattacgtagatacgtagaattggtataactcatcattattttctgtcttaatttttgattcaacac

SEQ ID NO: 29848 - DNA, 250 bp, Glycine max
  Clone ID: TF_GmC986_9
cgacggtggcgggaggtacgttggtggtggaggctgcggcgtcggcggatgaagctgctacagctgtggagagtctgggcattttgccagagattgcccatcaagtgctcgttgaatttactgttagggttgtttatgttttgcggattgttttaagtttttactttaatatgtcttagggattttaatggtttctgtccaaactatgggttcttatgagtagatgtgtggatttatccttgtttgtctc

SEQ ID NO: 29849 - DNA, 1991 bp, Glycine max
  Clone ID: TF_GmC10165_6
aggaagacgtggaaatgattctagagaatcttccagctcaaaggcagagcatgcttttctctgctaccatgcccagttgggtgaagaagttggcgagaaaatatttgaacaatccactcacaattgatttggttggtgatgaagaggaaaagcttgctgaagggataaaactttatgctatagcagccactgccacttcaaagcggacaattctttctgatcttgtaactgtttacgcaaagggtgggaagactatagtttttacacagacaaaaagagatgctgatgaagtatcattgtcattaacaaatagtataatgtctgaagcactgcatggtgatatatctcagcatcagagagagagaacactgaatggtttccgtcaaggaaaattcacagtgcttgttgccactgatgttgcagctcgtggactggatattcccaatgttgatttgattatccattatgagcttcccaatgatcctgagacttttgtgcatcgctctggtcgtactgggcgtgctggaaaacaaggtaatgccattctgctgtacaccagtagccagaggagaacagttagatccctcgaacgtgatgtcggatgcaagtttgaatttgttagtgcaccggctatggaagaggttttggagtcatctgctgagcaggttgttgccacacttggtggagttcatcctgagtctgttcagtttttcacccctactgcacagagactgatcgaagaacaaggaacaagtgcccttgcagctgcacttgcacaactgagtggattctcccgaccaccatcatcccggtctcttatcacccatgaacagggatggattacattgcaactaactcgagattcagatagtagaagatatttttcagcaagatcaatcactgggtttctttctgatgtttatcctgcagctgctgatgaagttggaaaaatccatttaattgcagatgaaaaggttcaaggagctgtttttgatcttcctgaggagattgctaaagaattacttaatagggacataccacctggaaacaccgtttccaagatcaccaagctaccttctttgcaagatgatgggcctccaagtgatttctatgggaggttctctgacagagatagaagtagccgaagaggttctacttctaggggaggttttagttctaggggaggttccgcttctagggaccggagaggttttaaatcctcacggggctgggatggggaagactctgatgatgatgactttggtgatcgatctagttggagaggtggtagaaattttaaaactggcaacagctggtctcgagcagcaggtagaagcagtggggatgattggctaattggaggtagtagacgatcaagcaggccttcatcatcagacagatttggaggggcctgttttaattgcggagaatccgggcatcgtgcatcagattgtccaaacccttcaaacagacgaagcttttaagttcccacatatttatttttgggcccccctttgttcaagacgtgagctgcttgctgcccctgtttttggcctaatgggttccggaaaattgaaagatgcttctcaaaagagttacagaattgatattaatttgcatctcacgtgttggcgtgatctccatagggacctctgtttttcgtcctgagtctcaatgaaatttagtatttgttttgggaagtggtattggataaagaatagtcttaacagtatggttatgtaatcttatttttggggtgagttgggggattgtatggttctgtattctattttaaccatgctactagtatttaacatctttttgaaccttcctggtttaggaacagacaggaaaaatgaatgaaagatgaaatcccaaaggtttatgcagaagattcattttcattcacttttcctgcgtcatattttcaagtattaaataaaatcataaaatgtcatccttttctgcataaaaaaaaaaaaaagggaggg

SEQ ID NO: 29850 - DNA, 1027 bp, Glycine max
  Clone ID: TF_GmC173_13
aattcggctcgaggtggctagtgctgtgtatatgaagtacttatgtttcgctagctttccgttcttctctttttgttcgcttcggctcctttaggttttccttccgtgcgtttactcggaactactcttccactcttcgtttaaaatgtctgacgtggaagagtatcgttgtttcattggtggccttgcgtggtcaacatctgatagaaagttaaaggatacgtttgaaaagtttggcaagcttattgaggcaaaggtggttgttgacaagttctctgggcgttctcgtggttttggatttgtcacatttgatgacaagaaagcaatggacgaggctattgatgctatgaatgggatggatttagacgggcgaactattactgttgatagagctcagcctcaacaaggatcaactagaggtgatggtgatcgctaccgggatcgtggtcgtgatcgtgaccgagatcatggaggtggaggtggccgaggatctaatggtggtgaatgctttaagtgtggaaaacctggtcattttgctagggagtgccctagtgaagggtccaggggaggaaagtatggtggtagggaaagtacatatggtggaagcagtggtggtggttatggaccagatagagcagatcgttcttcaggggggcgcagcaggggatggtggtagtcatggagattctggaagtgatcgattttatcgtgatcgttcaggaccatatgagcgagagcgacggggatcaggaggctttcgttgatatcatgtagtctttcaatgagatgtgaaattgaagaggttgctgttaatgcttcaactttccttttcattcgcacttgacaatgctctgtggacttctgggattgttgtttggatggatcattgataccagtattttgatatgcaatactcagcacattatgcaaactctttatgttcctaaatgctgatcttttggtcttgtgaaatcttatgcatgcttgacttgaggtcaaattcgatgttgagatcaatgctatctat

SEQ ID NO: 29851 - DNA, 1598 bp, Glycine max
  Clone ID: TF_GmC45275_1
ctcgggccggagtggagctgttacggctgcgtggggatttgcgtcgccgcaagcattgcagagtgacagcagcagcagcagcagcttggtctgaggttagagatggttagccaaaggcagcgacttgctcgaaagcgatacaaagcggaacaccctgagctctttccgaagcccgagcccacaccccccaaagaccccgagaagaagaaaaagaagaagaaaaacagcgctttcaagcgcaaaaggcccgagcccaagcccggctccagaaaaagacaccctctcagagtccccggcatgaagcccggcgagagctgtttcatctgcaaggccatggaccacatcgccaagctctgccccgaaaaagcagaatgggaaaaaaacaagatatgtttgcggtgtcgacggcgcggtcatagagctaagaactgcccctgaggtactagatggcgccaaggatgccatgtattgctataactgtggggaaaatggtcactctctcacacaatgtcctcaccctctacaagaaggagggacaaagtttgctgagtgctttgtctgtaatcaacgtggacacttgagtaaaaactgtcctcaaaatactcacggcatttatccaaagggtggttgctgtaaaatttgtggtggtgtgacacatttggcaaaggattgccctgacaaagggaagagtggatctgttgctgctaacaggcctgctgatggatggatgagaattgaagagaggcctatgggtcaggttaccaaatttgtcagcggggatgatattgaggatgacttcatgacagatgacatacatagtgcagacaagaaaaagccagcaaagtcaacagaagaccatgtaaaaccaaagaagaaggagggtcctaaagttgtgaacttttaactaaggatagttacctcataatgtattgtgtggatatttgtttccactcaccatttctttcctgttctatccacaaggctatggtagacccctgaatcccttccagaatgaatgtaatcgctcctgcaaagtcttgggttgcctaaatgtttggagaattgacatgaaaactaggactatcgcctctcattgctgatcataaattctacagtgatttgtaaaaggtaactgaaaatgtaactattttttggtacaagtactagtttattatttatctttactttgttgatcgactttcggtgcaatattgttactaatgagaggcgatagtcctagttttcatgtcaggttaccaaatttgtcagcggggatgatattgaggatgacttcatgacagatgacatacatagtggagacaagaaaaagccagcaaagtcaacagaggaccatgtaaaaccaaagaagaaggagggtcctaaagttgtgaacttttaactaaggatagttacctcataatgtattgtgtggatattggtttccactcaccattttctttcctgttctatccacaaggctatggtagacccctgattcccttccagaatgaatgtcatcgctcctgcagagacttgggttggcgtggggggggggggggggggcgtgaaagctggggactgtgggtctggttgggggg

SEQ ID NO: 29852 - DNA, 603 bp, Glycine max
  Clone ID: TF_GmC85470_1
gggtcagtccgttaagtttctcctcaattacgggaacggcggccgcaccatgaccgtggaggtcacttccgccgttagatctcgccgtacagggggcttccgcgtcggagtagggaggggaaaaggaggaggcctcggcggagggttcggtcgaagagcagcaggtcctgagtgttataattgtggaagaataggtcacttggcgagggattgttaccatggacagggtggtggtggtggtgttgatggtgatggtaggaatcggagacgcggcggcggtggcggtggaggaggacgagggtgttttaactgtggggaggaagggcattttgtgagggaatgtccggatgttggggaaaggaaatgagtgagaatgtgttatgttatgatttcttctgttgaattgtgagtatgttacagtcatcagttggggttggttacatggattctgttatttttgtttctagccattggcattaatttgcttccaaacatattttccacgctttgctaaattgttttatcttaatgcgcttcttttcaacaagtgatcgattatatatggtttgaatatgaatgtatgaagcaatggaacgcttaact

SEQ ID NO: 29853 - DNA, 621 bp, Glycine max
  Clone ID: TF_GmC104291_1
ggaaccgcaacagggtgttacaagtgcggcaaacctggtcactggtcacgagattgccctttctccgctcccaatccaaaccctaactctaacaccgccaccactcccaatcccaatactccaaatccttcttcgtcttctttcaagtccagatccgccaccgaaaagcccaagaaactcccccgaacaaagcccaagctcacaccggagcttcttctctccgacgagggtctcggttacgtcctccgctacttccctcgcgagttcaaataccgtggtggtggccacgaggttcgcgatttgggtaacctgcttcgtctgtacaccgaatggcactctcgcttgctcccttattactctttcaatcagtttgttcacaaagtggagaaagttgctgctacaaggcgtgtaaagacttgccttagagaattgagagaaagagttgcaagtggtggagatccaacaaaactgcgtgaaccacctgttgtgcatgacattccatctgatgagcacggatatgttgtatctgcagaagatgggggagcaactcatcaagagacagatgtgtttgcagaatccgaaaatgttaatgacattcaagaagacatgcttaatgatata

SEQ ID NO: 29854 - DNA, 1142 bp, Glycine max
  unsure (1)..(1142): unsure at all n locations
  Clone ID: TF_GmC9855_7
tcctcgcgtccggtttttctttttctcttctcactgcatcgcttcaggttcttctgaaaagatgtctcgcgtgtatgttggtaacttggattcacgagtcaccgagagagatctcgaagacgaattccgcgttttcggagttattcggagtgtttgggttgcacgtagaccacctggttatgcttttattgactttgatgaccgcagagacgcacaggatgctatccgtgaattggatggcaagaatggttggagggttgagctttctcacaactctagaggtggaggtggtggtcgtggtggtcgctctggtggttctgatttgaaatgttacgagtgtggtgaacctggtcattttgctcgtgaatgccgcatgcgtggtggttcaggaagacgccgtagccgtagtccgcccagattccgtaggagcccaagttatgggcgaagtcctcgtgggcggtcccctaggcaccgcagtttgtcacctcgtggacgtagctacagcaggtctcctccttatcgtgggcgtgaggaggttccttatgctaatggcaaaggacggaagaatattaggcatgatgagtgatgactggagtagaaatggccttagggaacgacgcagaagcagaagttgattttgagagtttggtattgggtatctgtgattgttaagagaatagtcagattttgttaatttagtggtgctttgactgaagtatgagtctgttttgttgggcaaggccctgagtttctactcttggattggaatagttagtttattttatgtctcagcttgtgttgaatttatctttgcttgtagtttcattgcaggtaatgatcttgttaaggttgttgttactagtttgttaaatatagttccagatctttctgcactngttttcctcaactagctagttaagtcttctttttggcctatggggcaagcagatgctgctctctctttcttctacttctgccttggcctgcagtacatggttttttcttggcctgtgtctttcgtcaaagtctgctgctttgtacagtttgactacttctactactactgcatgtaaagagaattacgaatgtgaacacaggngatttgcactgctatcgcgagctacacttctgttgcataatgg

SEQ ID NO: 29855 - DNA, 769 bp, Glycine max
  unsure (1)..(769): unsure at all n locations
  Clone ID: TF_LIB4167-066-Q1-N1-F3
aacaacaaccttaacaagatcattacctgcaatgaaactacaagcaaagataaattcaacacaagctgagacataaaataaactaactattccaatccaagagtagaaactcagggccttgcccaacaaaacagactcatacttcagtcaaagcaccactaaattaacaaaatctcactattctcttaacaatcacagatacccaataccaaactctcaaaatcaacttctgcttctgcgtcgttccctaaggccatttccattagcataaggaacctcctcacgcccacgataaggaggagacctgctgtagctacgtccacgaggtgacaaactgcggtgcctaggggaccgcccacgaggactgtaactccttcgcccataacttgggctcctacggaatctgggcggactacggctacggcgtcttcctgaaccaccacgcatgcggcattcacgagcaaaatgaccaggttcaccacactcgtaacatttcaaatcagaaccaccagagcgaccaccacgaccaccacctccacctntagagttgtgagaaagctcaaccctccaaccattcttgcctgctccatagaatagaaatgaaaaggcccaataaataaaaaagtgacacaaaactaatagtaatccaagtagctacgctttctacactaaattgtatgaaagcagcagctgtattcagtaaagtttaaagtttaaaccctaaagagaaacaatttcaccaaaatacatcacattgccattagcttaa

SEQ ID NO: 29856 - DNA, 622 bp, Glycine max
  Clone ID: TF_LIB4204-002-Q1-K1-E1
cccacgcgtccgtacggctgcgagaagacgacagaagggggctcactctctagggtttttatttctctcttctctctgcatcgcttcaggttcttctgaaaagatgtctcgcgtgtatgttggtaacttggattcacgagtcaccgagagagatctcgaagacgaattccgtgttttcggagttattcggagtgtttgggttgcacgtagaccacctggttatgcttttattgactttgatgaccgcagagatgcacaggatgctatccgtgaattggatggcaagaatggttggagggttgagctttctcacaactctagaggtggaggtggtggtcgtggtggtcgctctggtggttctgatttgaaatgttacgagtgtggtgaacctggtcattttgctcgtgaatgtcgcatgcgtggtggttcaggaagacgccgtagccgtagtccacccagattccgtaggagcccaagttatgggcgaaggagttacagtcctcgtgggcggtcccctaggcgccgtagtttgtcacctcgtggacgtagctacagcaggtcacctacctatcgtgggcgtgaggaggtcccatatgctaatggaaatggcccttaggaacga

SEQ ID NO: 29857 - DNA, 1576 bp, Glycine max
  Clone ID: TF_GmC174_3
aaacccatacttggtccggaatcccacgcgtccgtccaagataccacttgaaagggttaggtttcgggagaaaaaccaatccactcagagctagaagaattcaacgatgcctcgctatgatgataaatacggcaatacccgcctctatgtgggacacttgtcttcgaggactcgttcccgggatctggagcgtgccttcagcagatatggaagagttcggggtgtggatatgaagaatgatttcgcctttgttgattttagtgatcctcgagatgctgatgatgcaagatataacttggatggtcgggatgttgatggaagtcgtattattgtggaatttgcaaaaggggctcctcgtgggtcccgggaatatttggggcgaggtcctcctcctggctctggacgctgctttaattgtggccttgatggtcattgggcacgggattgcaaagctggggattggaagaataagtgttaccgctgtggggagagaggacatatagaaaggaactgcaagaacagccccaaaaaattgagcaccaggcgaggacggagttattcacggtcaccagtcaggtcacattcacctcatcgtggcagaagccgtgatcgcagttacagccgagatcgcagctacagtcgatcacgatcccctgtcagaagagaagaaagccctgttcgtgaagataggtcacaaagccctcaacacaaaaatagtcctcagccctccaagacaaggaagcatagtccatcacctgaccgtagcccacagaaaagaggtgacacatctcccgacaatgataggttgagtagaagccctgcaagggaccctgaagataggggctatgacagccctaaagttaatggtcgtagtggcagccctagctgtagccccagggatgatgacaggagccccattgacgatgacaacaaccaccgccactcgccaagaggcagcgagtcaccttaagtatttctcagagaaagaactctgtatgtggcctataatttatatctgctttggttatctgatgcactttgctgtgaagatcggggcaatttttagcttaaaaggaaactttatgaattgtttatggttatgaagaacggttttatgtatgggtattattcagtttatcttttgttgcgcaatgtatggcttacaaagaatataacctgcctcaatttgtgttgaaacattgtgaattatgagattaaagcctgcctgaatttgtgttgaattatggggtttctgaggttttctctaaacctggaggtctttgttgggaggttggacttggtggaattgatggaaattcctgtcgagtgttgactttggcgattctttctgtaatgttattgcgtgttttttatggaaatggcaacaatcacaaactggtgtttagttcgtctttgaggggtgatgtatcatacagttccagtagttaagtaatgatggccttattgtttctggcaaccatttccgcagaattcgaggtgtagatatgaagaatgattttgcctttgttgaatttagcgatcctcgggatgctgatgatgctagatatagcttgga

SEQ ID NO: 29858 - DNA, 882 bp, Glycine max
  Clone ID: TF_GmC92326_1
cggctcgagctcgagccgcgacgtcaccggcgtcgacggcgggcctcttcagccccgcgcagccgccggcaacaacaaccgcgccgccggctctggcttcggtttcggcgccaggcgcaatggcggaggcggcgccgcgtgctaccagtgtggcgagtttggacacctcgccagggattgcaacaggagcagtaattctggtggcggcggaggcggcagcggcggtggttgtttcaattgcggggggttcggccacctcgcgagagattgcgtgcgcggaggcggcggcagtgtaggcattggaggtggtggcggaggcggatcttgctttaggtgtggcggatttggacacatggcgagggattgcgccaccgggaagggcaacattggcggtggaggaagcggtggaggttgttttcggtgtggggaggttggtcatttggctagggattgcggcatggaaggagggagatatggcggtggtggtaacagtggtggcggcggcggtggaaaaagcacgtgctttaactgtgggaagccagggcattttgcaagggaatgtgttgaagcttcaggttgaggtgaagaagggtttatgacgttttgcgaagggagaaaaaaggtggaatagtacatattctctttttttgcaccttttaacagttattaacttattattattattatttcggggaagtttatacatatggcaaaaaaaagaagattgtctggttttgggttttttgactatggtactgcttcagcaggcgattttgccttctcttgtctttcttgttacagaactgttgagatttatatcttaatttatttgtctgaaaggtttattatcaatatgatcataaatttagactagtgttctcg

SEQ ID NO: 29859 - DNA, 1623 bp, Glycine max
  Clone ID: TF_GmC25809_1
tacggctgcgagaagacaacagaggggcgcgtccgaaaaaaccaactttgcggctgctctgctgcaaatagcgcgttgcatctgctcccaatcattcatataaaaaaaaacaactttgcggctgcgctgctgctaatagcgcgttgcatctgctacctatcatacatattttcgccaaaccgccgattccgttgagcgtttctaccgtagcgctcaggaaggaggcagtggctggtggtgttggttgtggtggaggtggttttgctgatcatttgtggtagagggtaggaaagaaaaaaaagttgaaaatgagttcagacagccgcagcaggagcagaagcaggagcccaatggaccgtaagatccgctctgatcgattttcctatcgtgatgcaccttacaggagagattcacgtcggggtttcagccgtgacaatctgtgcaagaactgcaagagacctggtcattatgcaagagaatgccctaatgtcgcaatttgccacaactgtggcctccctgggcatattgcttctgaatgtacgacaaagtcactgtgctggaactgtaaagaacctggccacatggcctgctagttgtccaaatgggggtatgtggcacacctgtggtatagctggacaccgttaaggagggtgctcagcccctccaaatcctccaaaggagtagaggtttgcaacaactgtaggaagacaggccacttggcacgtgattgtcctaacgatccaatttgtaatttgtgcaatgtttctgggcatgtggctagacagtgtccgaaagccaatgttcttggagaccgcagtggtgcggtggtggcggcggtgctcgtggtggcggcggcggtggctaccgagatgttgtttgcaggaactgccagcaattaggtcacatgagtagggattgcatgggccccttgatgatttgtcacaattgtggaggtcgtggtcacctggcatatgagtgcccttcgggtcggtttatggaccgctaccccaggaggtactgatgatggtatgcgttaccagttatatggatgtttttctgtgattttctcgccgaggacagattgttgagtcttggtagtgtatgtgtttttgccttattatttttaactggctagagacatgacaatgcttgtgctgggaataagaatttgctactggtaaaacatgtatgggatgcattgggttgcctgatgaggttattttttattggttcagtacaagtttttatgtcgttagtttttcctttaacccttctcttcttatgccttattaatgtttgttttattgcgacgggactctctgttagggttagggttagggttaaattcgattcggattcatcttgtcgaatttgggtacgatttccttcagtttccctcattttccgatatcgatgcttggggtttcgtttcgccttgattccctgtggtgcttaccgttatcggctcttcttagggttccgattccgaatctgtaatttacataaggtttggacgtgacggatttatgacttttgatgtgtgttttcctggtaatggttgacgatctatgtttctacgcgtaagattgaacggttttcccaaaaacaactttgctcggatgt

SEQ ID NO: 29860 - DNA, 516 bp, Glycine max
  unsure (1)..(516): unsure at all n locations
  Clone ID: TF_GmC92326_2
ggggttcggccacctcgcgagagattgcgtgcncggaggcggcggcagtgtaggcattggaggtggtggcggaggcggatcttgctttaggtgtggcggatttggacacatggcgagggattgcgccaccgggaagggcaacattggcggtggaggaagcggtggaggttgttttcggtgtggggaggttggtcatttggctagggattgcggcatggaaggagggagatttggtggtggtggcggaagcggcggcggcggtggaaaaagcacttgctttaattgtgggaagccagggcattttgcgagggaatgtgttgaagcttcaggttgaggtgaagaagggtttgttacattttgcgaagggagaaaaaaggtggaatagtacatattctcttttttggcacattttaacagttattaacttatgattagtctctcttattgttattattattattcatctaatttcggggaagtttatacatatggcaaaaaaaagattgttttggtttt

SEQ ID NO: 29861 - DNA, 1253 bp, Glycine max
  unsure (1)..(1253): unsure at all n locations
  Clone ID: TF_GmC25809_3
cggccgctcgaggcggcgggcgggaacaaattaaccaactttgcggctgctctgctgcaatagcgcgttgcatctgctcccaatcattcatattctcgccaaacagccgattccgttaagtgtttctaccgtagcgctcaggaaggaggcattggctggtggtgttggttgtggtggaggtggttttgccgatcagttgtggtagagggtaggaaagaaaaaaaaagtggaaaatgagttcagacagccgcagcaggagcaggagcagaagcaggagcccaatggaccgtaagatccgctctgatcgattttcctatcgagatgcaccttacaggagagattcacgtcggggtttcagccgagacaatctgtgcaagaactgcaagaggcctggtcattatgcaagagaatgcccgaatgttgcaatttgccacaactgtggcctccctgggcacattgcttctgaatgtaccacaaagtcgctgtgctggaactgtaaagaacctggccacatggccagcagttgtccaaatgagggcatttgccacacctgtggtaaagctggacaccgtgctagggaatgctcagcccctccaatgcctccaggggacttgaggttgtgcaacaactgttataagcaggggcacattgccgcggaatgtacgaatgagaaggcttgcaacaactgtaggaagacaggccacttggcacgtgattgtcctaacgatccaatttgtaatttgtgcaatgtttctgggcatgtggctagacagtgtccgaaagccaatgttcttggagatcgcaatggtggcggtggtggcggcggctgctcgtggtggtggcggtggtggctatagagatgttgtttgcaggaactgccagcaattaggtcacatgagtagggattgcatgggccccttgatgatttgccacaattgtggaggtcgtggtcacctggcatatgagtgcccttcgggtcggtttatggaccgctaccccaggaggtactgatgatgggaaatttatgcgttaccagttatatggatgtttttctatgatttctttgccgaggacagattagttgagttcttggtaagtgtatgtgtttggcttatattatttttaagcttttctagagtcagtgacaactgatgccacattcacccgcgcaaatntatagtgttatgatatacagtgcaaaatgctaggaanaaaaaaanaaaaaaaaaggcgcggccgccgacnntagtgag

SEQ ID NO: 29862 - DNA, 871 bp, Glycine max
  Clone ID: TF_GmC55382_1
caacgatagtaaaagcagaaaaggtaaactttgcttctaaatctagagttaatttggagttgatttttaacgaactcagggctgagaaatcgaaaggtatcaccattcccaactctgtaaccaataatactagactggggagcgttgaaactggacaagttacaccaccagcttattataagagcaatgctaataccagtagagattttgggatgccggcaaatcaagtgggtcaacagcatggaaaccaatatagcaatatttcttctgcaggtgctgctcctggttcatatacatcatgcaccaactgtggagtctctggtcatagctctgcactttgcccaaatattagaaatgtacctggacattctgcaggagggggctttgccaacagggcatctgcgggattaggtggtggtggtggtgcttctgtcgaatgctataaatgtcatcaaagtggtcattatgcaagagattgtcctggtttcagtgcagcacctccatcatcatatgggagcaattcaggtggtggtggttctggcgaatgctttaaatgccatcaaactggccactgggcaagagactgtcctggtctcagtgcagcaccttcatcatatggaagcgctaatgcaatgcagggaagatatggggttgctcaaaagcaacaatttggaggatattgaaatttgttggagttcgttttcattttgtttcaagtattttatcatgtctttgaatatataagcaattttcgtcttaactgttaacttctgtatatacaggaagtgattatgtggtactgaatgctacgtttctttatgcaaacaccgtgcgacgtgcaaaatcatataccagtatatcttttatttcc

SEQ ID NO: 29863 - DNA, 1584 bp, Glycine max
  Clone ID: TF_GmC174_1
gtggcttctagtatttgctttgaggaattcagttgtacatgatggaatgatttctgtgttactttcttggcgggttcattacaactggggggcgggattttaatgatcctcgacatgctgatgatgcaagatataacctggatggtcgggatcccacgcgtccgtacggttgcgagggtagaagagatcgagccgagaccgctcgcactttgaaagggttcacgaagaaacaccaatccactccgagctgtatgttttcaagagctagaagaaatcaacgatgccctcgctatgatgataaatatggtaatacccgcctctatgttggaccgcttgtcttcgaggactcgttcccgtgacctggagcgtgtcttcagcagatatggaagagttcgaggcgtagatatgaagaatgatttcgcctttgttgaatttagtgatccttcgagatgctgatgatgctagatacaacctggatggtcgtgatgttgaaggaagtcgtattattgtggaatttgccaaggggggtcctcgtggttcccgggaccgggaatatatgggtcggggtccacctcctggatctgggcgatgctttaactgtggcattgatggtcattgggcccgagattgcaaagccggggattggaagaacaagtgttaccgttgtggggaaagaggacatatagaaaagaactgtaagaacaggccgaaaaagttgagccaacgtggaacgagtctttcacgttcaccagtaaggtcacgttctcctacgtcgtggaagaagcaagggatcgaagctacagtcgagaccacagcgacagccgagcgcgatctcctgtcagatgagaacgaagcccaagtttctgaagatagatcacagagtcgtgagccctccaagataaggaagcatagtgcatcacctgaccaaagcagcccacggaagagaggtgacacatctcctggcaatgataggttggccactccatcaagatgggtctgactacagtgatggtcctagagggaaaagtagaagccctgctagccctgcaagggaccgtgatgagggtggctatgatagccctaaagctaatggacatagccgcagccccagccggagccctagggatgatgacaggagccccattgatgaagatgataacaaccaccgtcgctcacagtcactttgaaaacagcacttcctgataaaatgagattcctgtgggtgaagcaccaagtatgacgaacggagaatattgagtgcatgtgtttgttacaaatgttgctaaaattcacattaaaaagaactcttgttaaaaatataagttcaggatgtgacccaatttgtatctgcctttgtttataaaatgcactccagcttaattatgtgacaattgtttctgaaaacagttttatgtatcctatttttcagattcttgctggtcaagcagcatgtatggcttacctagaatatggagtgcatgaatttgtttcaaatgttggcataatttaaatcaatatgaactattgtgagaaaaaaaaaaaaaaaaaaaaaaaaaaaaaaaaaaaaaaaaaaaaaaaaaaaaa

SEQ ID NO: 29864 - DNA, 549 bp, Glycine max
  Clone ID: TF_LIB4367-017-R1-N1-F11
gggttttggtgtcactttattggcttgttcctgacattttgaacaggaatttagcgatcctcgggatgctgatgatgctagatatagcttggatggtcgtgatgttgaaggaagtcgtatcattgtggaatttgccaaggggggtcctcgtggttcccgggaaaacttgggtcggggtctacctcctggatctggacgatgctttaactgtggcattgatggtcattgggcccgagattgcaaagctggggattggaagaacaagtgttaccgttgtggggaaagaggtcatatagaaaagaactgtaagaacagtcccaaaaagtcgagccgacatggacggagtctttcacgttcaccggtccggtcacattctcctcgtcgtggcagaagccgggatcgaagctacagccgagaccgcaactacagccgatcgagatctccagtcagaagagaacgaagcccagtttctgaagatagatcacagagtcctgagccctccaagataaggaagcatagcacatcacctgatcaaagcagccccacgga

SEQ ID NO: 29865 - DNA, 221 bp, Glycine max
  Clone ID: TF_LIB3242-590-P1-J1-B7
ctacaacagtggagaatcgggacatctttctagggattgcagaggaggcggaggtggggacaggtacggaggaggtggtggtggtggcacatatggaagccgccgaggcgggaggtacagtggtggaagaagcagccgctgccgcagaagaaactgctacagacgtggagagactgggcattttgccagagattgcccatcaagtgctcgcagaatttact

SEQ ID NO: 29866 - DNA, 1938 bp, Glycine max
  Clone ID: TF_GmC2715_1
aaaatcggcactcatgagttattattagggtttgcaacctttaaactctgaagctgcaatagcacagcacagaatggggcgcaaagagaagcagaacgcgaaggcaatagatgaggaacacgacgtagtaaattttaacggcgcttcaacgccgtccctcgttttcagcagcgacgacgatgaagccaaccaagatctcagcctcaagatcgtcgaaaaggccatgcgaatgcgcgccgccaaacacgccccaaacgacgacgtttcttctccgttttcgcagaaatccgaactcgcagtgcccctaaacgacgtcgtttcggatttgcccagcgcaatcgctgattccgaagtgacggaaaagaagaaaacggccaagttgaagagggaggcggctggggatcaaagtgttgttatagcggaggagcaagagatggaggagacaagcaatgctacagagaatcacgagtttgtggaaggaagcccggttctgataggccacaatatggttctgcgaaagctgcttcggggtccaaggtattttgatccaccggatagtagttggggagcatgtttcaattgtggtgaggatggtcatgctgctgtgaactgttcagcagcgaagcggaagaaaccatgctatgtttgtggtggtttgggacacaatgcaagacaatgcactaaggcgcaagattgctttatctgcaagaaaggtggtcaccgtgctaaagactgtctggagaagcacacaagtagatcaaaaagtgttgctatttgcttaaagtgtggaaattctgggcatgatatgttttcatgcaggaatgattattcaccagatgatctcaaggaaattcaatgttatgtctgcaagagagttggccatttatgctgtgtcaatactgatgatgcaacaccaggagaaatttcttgttacaaatgtggtcagctgggtgaagctgacagaaggggttcaaggttgcgggatgagattacaagtggagccacacccagttcatgcttcaaatgtggtgaagaaggacattttgcccgggggtgcacaagttctatcaagtcagggaagaggaattgggaatcatcacacacaaaagataaaagatcccaaaaagaaaatgattacatgggaaatagatctgcatctaatgatatggttggggctcgcagaaagaaacgttcacctaccgaagaaagaggcttttcaactcccaagaaatcaaagagtagaggtggttggacggcggagtatcctaccgaagaaagaggctttacaactccaaagaaatccaaaagtagaggtggctggacaacagagcatcctactgaagaaagaggctttaccactccaaagaaatccaagaatagaggtggctggacatcagagcatcctttggaacaaaaagactacacaactcccaagaaatccaagagtagaggtggatggatgtcagagcatcctgaagaattctttcctcccatgtcctcaaggagcaatggttataggtctctagggacaccatcttctagaaacaataaaattcattcatttggtggtggaagtcacactccaagttataaatcttccaaggtatggaatgatcatgcaggaacttcaatgtctcaaggatcagccaggtcaaatcatcatagattttcagcatcaaggtttggcaactctagtagtgacggacatggtagaaattacaactggtggtagcgatcatgtatatgctgacattatgttctctatatttccttttgttaacttgtaaaacagcacctgcaagttttctaaattaatatttaatttttcctttcagatatctattcaatgatactgtcgtaattctttcaaatttatggatctgttttaagggtatccaaattccctgttgaacttccgaaaaaaaaaaacttcaaaaa

SEQ ID NO: 29867 - DNA, 388 bp, Glycine max
  unsure (1)..(388): unsure at all n locations
  Clone ID: TF_jC-gmXLIB3563P014ag08a2
gggaggggggaaagcagcgaagggcattttnnngntncgcggggaacaggaatcgcggcgcgtgaatgtcgccggcaattaaacgctctttctactcttctggccttgtcaatgcgcatataacataggaaaagaaaaagaaaaatgcccacagagagagagaaaagaaaagaacgaaaaaccaagaagcggcgaaacgatcgtgagagatgaacaagggcgaactgagcaaaggcccggggaggatcctacgcgaggcggaccaggcgagcttatgctgggaccgcgacgctaaggcgcacagggccaacttcgtgggcgcgagacacgcgcgaaccttactgcggcggacgtgccgctcgcccacgccgcggaaggccgccggcgc

SEQ ID NO: 29868 - DNA, 480 bp, Glycine max
  Clone ID: TF_LIB3242-138-Q1-J1-C10
caaaacaagtggaatcacaaatttctttctccatctttaatgaccaaattgacctttaggcaagattggtaaaagacaaatggactaaaatacagacacgtgtgattacgtgaagaagtggcaccccatgtccttgtctagtagaactcgtccatagaatgatcactttgttataaaaaggctttatattcttatattcatctacaccaagctacaccatttgttcaagaaactaccaagtagcaagcttgattattattattattattatcattatcccattgagcttctaaaaatgtgcaaaggtgcagaaggagaaaagcaacatggtttctgcagcagctatctacataaagaatgtgcaaccagaagtgctacatgttgtgagctatgtgggttacaggcttcattgtattgtcaagctgatgatgcatacttgtgtagaaaatgtgataaaagggttcatgaagctaatttttt

SEQ ID NO: 29869 - DNA, 272 bp, Glycine max
  Clone ID: TF_LIB3056-003-Q1-N1-G10
attagaccagtgaatgcaaagtgatgttccgagaattaccatacaggaattgaaagaacgacgcttgaacggattcaggagcccctgtagcgtgccaggacaagccatgcgatcaatacaagctagcctcggcagttcttttcttacgacccaattccgcattactatgcatatcctgcgattccgacattcactgctcgaacaaactcatgtaccgccacgatcccgtgtcgatgtgtgagacgtgcgagcctgcacccattgatgtcacg

SEQ ID NO: 29870 - DNA, 431 bp, Glycine max
  Clone ID: TF_jC-gmle01810044g07a1
ctttggctagtcaaaagatggaaggagaagctactatggctacgagggctaacatgtgcgacacgagcagtctggtccgctaattcgtgacgtgtggtgcgcatactgacttactctgcgcaaagtgcgacgctcgcatacacccctcgctgacccagaagcatcgcaagcgagcgctcaaggccggctaacgcgcagctgcagtgttcctatgcgaggttgacgctgactgggtatgcgcctcctgggacaacgcatccacgcagacacacgctctgcaacggaacaatggtgatcagattgatatgaatgcagcttgctcctggatcgacgtctacgagctcgcatacaatgctgacttggacgacgactactgaaccgcttgatggctcttgctcaaccctgtcacaagcgctaatgtccctaacaac

SEQ ID NO: 29871 - DNA, 328 bp, Glycine max
  unsure (1)..(328): unsure at all n locations
  Clone ID: TF_7591390
aaagattcagtacagcgtatacaaagccacaaaagccaaagttctatactgcaccaacgaagcagcactatactgagaatgcgacaagaaagttcacacagcaaacaagctcaccagcaagcaccagaagatccctctctctctctccgcctctcacatacccaagtataacatatagccaaaaataattaattatttcttctatttagagaatcaagctttactatatagaaattataatatatctatacatacancaaatacctatatctctaatcatcaggaatggttacttactagtatgagagtgaaccttaaagctactgag

SEQ ID NO: 29872 - DNA, 412 bp, Glycine max
  Clone ID: TF_GmC24129_6
cccacgcgtccggcgagaagacgacagtatggggacacaccatttgcattattcttctcttcttttcttttcatatctgatctacatttatctatattctcttctcttctctctcaaccttctcaacagtcttattagcagagagcacaagagaggacagggaaaacagaaaaaaaaaaattcggcttctgcatcttcagataagaagggggaacttctctattttttgcggcatatcgtggtttgtaaagactgtttctaggtggagattcattaattgacactgaggtgcaagagaaaagtgagtctaaagatgggttatatatgtgatttttgtggagaccagagatccatggtgtactgccgctctgacgctgcatgcttatgtttgtcttgtgatcggaattgtcat

SEQ ID NO: 29873 - DNA, 469 bp, Glycine max
  Clone ID: TF_jC-gmXLIB3563P061ad12d2
cggcccgccggtttggtttgggggtttttttgaatgaaaatttactgtaacgagtgttaggcttgttgagccacagttcttgtgttgatgctaacgaggctgctctgtgttgggagtgtgatgagaaggatcatgctgataacaaacttgcctttaaacaccaaagagtggctgtttctatctcttggtatcatttgcccgaatgggacattggtcaggaaccctttagctattttttttgcctacaagaacgggctctgctctgcatcaaaatgtgattgtggccttacacactggaaaagcttttgtctctcgacatcaaaaggttcttttcactggtgtaagagtttgccttgaagctatagaacctggggcttccttaacttctttgacgacaaattctggggagagagtttcagatgcaaaaaattcttctgtctgtagaaaggttttcactgtgccccaacca

SEQ ID NO: 29874 - DNA, 221 bp, Glycine max
  Clone ID: TF_jC-gmst02400049f05a1
ggctcgagaacaaataccagggagccaccaaccatggctttcaagctctgtgacacatgcagatgggacactgataccttgttctggcggcccgacgcggtctttctctggggggcctgtgactttaaggttcatgccgccaacaagctcgcatcgcgccacccacacgttttgctctgtgaggtgtgcaaacaggcgcccacgcatgtgatctggaaagc

SEQ ID NO: 29875 - DNA, 1229 bp, Glycine max
  Clone ID: TF_GmC998_1
tttggtcacagcatactccactctctctacctcagagacttattaagatgaagcccaagacttgcgagctttgtcatcaactagcttctctctattgtccctccgattccgcatttctctgcttccactgcgacgccgccgtccacgccgccaacttcctcgtagctcgccacctccgccgcctcctctgctccaaatgcaaccgtttcgccgcaattcacatctccggtgctatatcccgccacctctcctccacctgcacctcttgctccctggagattccttccgccgactccgattctctcccttcctcttctacctgcgtctccagttccgagtcttgctctacgaatcagattaaggcggagaagaagaggaggaggaggaggaggagtttctcgagttcctccgtgaccgacgacgcatctccggcggcgaagaagcggcggagaaatggcggatcggtggcggaggtgtttgagaaatggagcagagagatagggttagggttaggggtgaacggaaatcgcgtggcgtcgaacgctctgagtgtgtgcctcggaaagtggaggtcgcttccgttcagggtggctgctgcgacgtcgttttggttggggctgagattttgtggggacagaggcctcgccacgtgtcagaatctggcgaggttggaggcaatatctggagtgccagcaaagctgattctgggcgcacatgccaacctcgcacgtgtcttcacgcaccgccgcgaattgcaggaaggatggggcgagtcctagctgatgatagctataccaatgcattgtaatgtatgtgtaatccaaatgtgtggatttcaaatttgagtttagtttcctttgcttttcttttcttttttgtatctacgaatggttgttgattaatgtgtagcaattggatcaacaaattcgaatataaatgaaaaactagccagccaagcaactcattctaaatgtgcttaatagacacgcgtgtcgtggtctctcaaaaaaaaaaaaaaactcgagttttttttttttttttttaaaataaaaataaaaaaaactatatcaattaaagcttattttcaatcttacactcattttcccccgaaattgaaaaaaagcaaaaactaatagctagtgaagccacattccacggaactattaattgatggaaatgagcttattcaatatgaattgaagacacagctgatgtgattccattggttc

SEQ ID NO: 29876 - DNA, 1310 bp, Glycine max
  Clone ID: TF_GmC24129_2
tctatctcttgaaaccacgcgtccgctcaacacaacacaatacaacagtcttattagcagagcacaagaggaggagagagaaaaccaaaaaagcaagagagagaaagagaaatcaggcgtttccgcccacagttgtcctgccgtctttcttggctgtgcgcccccttcaatccctctcttgcgcgatcctcctgggctcgctccttggcctgtgttttccctgcttcccgccagccgctgtattgccggcatgcggttcctggtttcgttgtcgcctcggctgttggcctctatggtgtggggcagaattcggcttctgcatcttcagataagaagggggaacattctctattttttacgggcttattgtggtttgtaaagactgttactaggtggagattccttaatttacactaaggggcaagagaaaagtgagtctaaagatgggctatatatgtgatttatgtggagaccagagatccatggtgtactgccgctctgatgctgcatgcttatgtttgtcttgtgatcggaatgttcattctgctaatgccctctctaggaaaatggtgtttggattgcctttctatagatgcttggcactttctgctgcataattcttttccaagaatttaaaaagccttctaagttctttgaccttaaccatacttccatgtctgtgatgtggtcatgtaaactccccctctgctaaatagtctcctactctaatgcctgagatggcatgataattggcttacttttaacagttccagataaactacgaaggttgtaaattgtaatatttggctttgacatgtatagcacacagtctacatatataattttacccaactcttttatgtaatcagacaaaaattgtaaattcaatctctcatgtatagaataggatactatgcatgttgatggtagtctatatatatattggacatggaccgatacaagtttgtattctggaccagccagctagacctgccaatgaatgtctttcaaagttatactgtcctgctacaaaattccccgcattatgtgaaaatgataatctgtatgatgatttcaacatggatgaagtggatctaaatcttgtgaactatgaagaactttttggtatggccctcagtcattctgaagagctatttgaaaatggtggaattgatagcttgtttgggacaaaagacatgtctgctggagatttcagttgtgaggatgctattgctgctgaggctgtttgcattggaatgtgattcctgggctacactgctgtaatatgaatgcattgcgttattcatata

SEQ ID NO: 29877 - DNA, 1485 bp, Glycine max
  Clone ID: TF_GmC12_1
tttttaatatcaaattttaaaaaaacatattagtaaaattaaacaatattctatctgatttttataagaaacgaatatcaaatacattatttaatcaggaagatattagttgagttggatagtaaaaaataaaataaaattatagatttaattttcttattaataaattaacatttatttataaactaaaaataaaaattatgagctttgactaagagctaatagtagattaattgtataataaatttattgacagataacaatctaaatcaataaattttaattttaaaaattatttctctcctttactatcaagtatttttcaactttgcattcgtctggttgtggaatccttcttaatagtactgttttagaattgctaagatgaagtcaagttttgaggaattgaagaagaagaagaagaagaagggagaaggagagcattggaagacatagagataaagaattgaagataatgcgaaccctttgcgacgtatgcgagagcgccgctgccattgtcttctgcgccgctgatgaggctgctctctgctccgcttgtgaccacaagatccatatgtgtaacaaacttgctagtagacacgttcgggttggccttgctgaccccactgatgttccacgctgtgacatatgtgaaaacgcacctggtactgaatgctttcttttactgtgagatagatggtagttcgctgtgtctgcaatgtgatatgattgtgcatgttggtggtaaaagaactcatggaagatatcttctattgaggcaaagagctcagtttccatgtgataaacctgcccaaatggaagaactagggctgcaacctatggatcaaaatgaatcaaggagggatgaaagtcagtcactcaagctaaaaataagagatagtcagcagaatcacagtgtctcacctgttccaagacaagaaaataatattgatggtcatggaaaaatggataaaaagttaattgatcttaatacgaggccactgcggttaaatggagcagcaccaaacaaccaggaacgaggtatggatattttaagaggcaataatcataaatctgcgagtgtgccaccagtagaatccttcaaacaagagtctgagaagtaataaagctacaacatatagggtgtggtcagaggctacagaaatattatgtttacgcaaatttctcttacactgctgaccttgtttatgtgaatcttgttttttgtctgcttaaaagtttagttgtttggctgcagaccaaattaatgagggaaaatagttgctttcatatggatgagctgcataaacaaggttactacagcttaaactcgagggtataacatgattgttgccagtatacaccacgttccttaaagcagcttatgtccgatgcatccttaatattttggttttcctagtctgacagcagaggacctcttggttcttatacaaactttatgatattttattacatgtctaaaaa

SEQ ID NO: 29878 - DNA, 1464 bp, Glycine max
  Clone ID: TF_GmC117_1
ccgcggaataacccatcaaaacaatcattcccctgttaccaaaaccacactgtaacccccctttttttggtattggcttcaaatgagttcggctactaagaacgcggcaaacgcggttggggccaaaacggcaagagcatgtgacagctgcataaccaaacgtgcacgttggtactgtgctgccgatgatgcttttctctgccaggcctgcgactcttctgttcactcggcgaatcctttggctcgaagacacgaacgagtccgcttgaaaacggcgtcctacaagtccactgatgaacaacaacaacaacaacaacaacaacctcccacgtggcacactaagaaacctcgaacgccgaggcaccggaaacattctcgtaacaacaaccctttccatttggtccctgaagagggttcggaggaggcgaattcccatgatgagaacgaggagcagcttctttatagggtccccatattcgacccttttgttgctgagctatgtgggactaatagttctccttctcctgttacttcaactgatcaaggggtagttgctgctgctgaggttgaatacaaagggattcaaagcaatggtttttgtagcaatagcaatgagatggaaaacttgcatgggatgcttccttctgatgcagaacttgctgagttcgctgctgatgtggagagcttgttgggtagggggcttgaaaacaagtgcgtggggatggaagaattgggactggttgatgcgaaagaggaggagtgttcggtaggtagtgggaaggtgaagatggaagatcaggaagagagccctctggtggagatggagatggatatggtcgtgggaagagatgatcaatcgtttgagttgagctttgattatgaaacgtgtgaagaggtgaaggtttgtgatttgggattggggaatgaattaggagcgaagaaagagaatgatgatgaggtgaaaaagaacaagatttcgttgcagctagactatgaggcggtaatcatcgcctgggctagccaaaaatctccgtggaccaccgctgacaaaccaaacttggaccctgatgagtgctggaaacaatgcatgggaagttgcgaaacggcatatcatcatccttgcggtgaaatgggtggatttgggattcatccagtgataatagacgggggcagagaggcgagggtgtcaagatacagagagaagcgccgaacgaggttgttctcgaagaaaataaggtacgaagttaggaaattgaatgctgagaagagacccagaatgaaggggaggtttgtcaagagggcttcctttgcaccaccaacatttcctttgctaaataaataagagctacatttgttgttctgccactaaagttttgttagtatttgctaagtatagttttgcgacgtgatatcgcttttcatttcattttcttatttctttgtatataaaaattttgctaagtt

SEQ ID NO: 29879 - DNA, 2442 bp, Glycine max
  Clone ID: TF_GmC5877_1
gggaatttagaatgcttagaataaatgaatgaataaagttgagttccctctaacagttattttagagtttagttgagttatcatgaataatcatcagtgacactgtaggagcatggatcctctatgtgagttttgtcgggtggtgagagctgtggtttactgtaagtcagattctgctcgtctctgcttgcattgcgatggctgtgtacactctgcaaattctttgtctcgcaggcattcgcgttccctcctatgcgataagtgcaattcccagccggcaatgatccgctgcatgaatcataagttgtcattatgtcaaggttgtgactggaatccaaatgactgttctgcattgggacataggcgccttgcattgaattgctacactggttgcccctctttggctgagttttctaggctctggtcttttgtgtttgatgctaattcctcacttggtggttgggaatcggttggtactttgccaaaaagtgagagctgcactagccagtgtttggagcaaactgatcataatggtggttattttggtttggtgagtgacaagttggatgaaattgaatcttgtgtcagatatcaacctcggatggatcagtctcaaatcattccatcaaatccaaattacacaccgtactgcaaagacgaagcatttttctttcctcaagactcaaaccagccaaagctgcaggaatgtcctaatctaggaattcatgatgggaatgaactttgtgaaggtttcaatgtggataacgttcaattaaactttgaaattgctgatgaaatattttactgttcacaagttgccacaagataccaccttgaagatggaggaatggactgtttattgatggataaaaacatagcagttacagaatctagttcacttattgagagtgccatggaggcatcatcatctatccaacaagattgtgtggcttttcaatcatcgagggctggtgggtcagctagtgtgatgcaggttatcaacagcaataccaattgtgcacttatgaatcctagctgcactaaaaacatcagtctgggatttcctcagggcctagttcattcaaacatgccacttcaatttcccaacatagttggtgaaaataattctactgaatatcaagactgcgggttatcgcgagtgggtgaatccccctgggaatcaaatttggagggtacatgcccacaagcaagggataaagctaaaatgagatacaatgagaaaaagaaaactcgaacctttggtaagcaaataagatatgcttctcgcaaagcaagggccgatacaagaaaacgtgtgaaaggtagatttgttaaagcaggtgaagcatatgattatgaccctcttgggacaagggacatctaagcatattatctacaataactatcttttccatgaaagatattcttctgactggtaaggtggtccctggaccttgtgagtacattgctttgttgccaattcttcatcaacagacgttttgtttatcttgtgaaagtgggagagttataatgcagctagatatttattcaaaacttgactgcttaggtgattgatacagatctattagagattttaacatatttagaagataacaaagatatgaaggtgttgcaattgggaattgcagaggaagggattggatgtatgccaagataatgcgtttaattatacataggaagtgtgagaggtaacaggcatgggacatagaggagcagaacatttgaacagatttcaaacagcatcacagtcattgtcaattcagacaaaaacagagggcctggatattcctccttgcatttagaggagatgtgcagagtgatccatcctgaatttcaaatgtgatattgtgagtctctgagcctatgtgttctatataaataaacactgcctagtgtaatgaataaaagagaaactggtgtttggcaagcaacaatagccaacctcacactttctgctttcagtttggtccttccgtcctcatggggatccttcacacgaccttattctgtcatcttaagccattgttcaaggacagcaacaccatattttggaacctcttcatttattccattttcatcagattagtgagcacgatcgactgttgattgagatactattgttcttgacttgctggaagccagttttacctgccgcaactattggcatctttgacattgcctcaactatttcatttgttgtattcctctatatttgctttgaggatggcacctatttcttcaataattgtacaaacattgtgtacaaactttcctgatttcaagggacgtttgtttctcctatgaaataggagatattaatgactgttttattgttttgtaatttgcacaaatctgttattattcattaaatttctgtagaatgttgataagaaagaaactacagtctttactgttccgagt

SEQ ID NO: 29880 - DNA, 1818 bp, Glycine max
  Clone ID: TF_GmC906_1
gcataaccaataattgaatttgaatcatttgggtctctagacacaaacactaccccctctttccccctcctcaacattgttatgatcccttgttggtaaccattccatttgcacttgtctttgcaaccaaaaaacaagctctatgaccaacgaaatgaaagaagcaagtgccttaggagctagaacagcacgagcatgcgagagctgcctaaaagtaagagcacggtggtttttgtgcagcggatgatgcattccttcaccatggctgtgacaacatggttaactcagcaaaccaattagtaggtggccagaaaaggttaaagctccaaactccttcttccatgtgcaacaataccttgacccctaagttggttggcctaattgtatgagaacaaagtctaaaatctccttacagtatcaaagccgatctccgtcatttgtaacaaaaggagaaagcgtctgtttagacctaacatgacgatctcaaaagcgagcttttaattacaatattagtcatcgtccccttgtgcctgagcttggaaaagaagagccaatgcttaatgatgagactgaggagcaactacagtgtcgcgtgccgttgtttgatgctgggttcagtagaatatacaatgaagtgaaagactaggttgtagctttttgtgaagaagccttggacttggaaaacttttcttccgagtttcttccatcagatacggaccttgctgagtttactgctgatgtgaaaagctttcttggaaacggggctgatgaggattcacctgatgatgatgagcacgtgaaagaatcagaactactgattcttgattgcaaagaagaagaaggagatgaggaaatggatgaatgttttgatgtagtactaattgaagccaaagaaggaatggtgaaggtcaaagatgaagaaaaacttgatgctgatgatgacacagcttgccatttggattcgattcttgatatgaacggcgaggcatttaattggaatattgttgaatcagaatcacctgcacaggcacaagaagatgaagtgagtaaagtgggaactaagaaggacatatttttgagattaaactatgaagaagtcattactgcttgggcaagtcaaggttctccatggactaatgggaccccacctaagttcttcaactctgatgattgctggctagacttcttgggttcgaatggtgggaatgttcaatgctgttatggggcagtgggaagcttaagggtgcatgcagatgggggaagggaagcaagagtgtcaaggtaccgagagaagagaagaacgcgtttatttgcaaagaagataaggtatgaagtgaggaagttgaacgcggagaaaagacctagaatgaaaggtcgatttgtgaagaggacaccctttgttggagccactgcgttgccagcttaatcatcaatcaccactgacatgattgatcatcaaagtgatcaaataaatggttaacttctccaagttaatttgattttatggaaaagttaatttttagattaattattagttacttggttttgccatatatgtacaatatcatcactaggtcaggtttctcttgcttgggatatttatttctttctctaacaggtctagctagtactaatggaaatgtggtagcccctctcagcattttgaaggctttggtaatcaatttcgggagccctttttcaatgttgcttaattatgatatatataagaatctgtaattaatctatgctgatgttatgtttacctttaactctgagggtactgattaacagtgtttaacatcaggtacttatatgtcc

SEQ ID NO: 29881 - DNA, 441 bp, Glycine max
  unsure (1)..(441): unsure at all n locations
  Clone ID: TF_uC-gmflminsoy034d11b1
aactatcatacccacatggatggnggggaacatctgggttcttggtggcctctttcaatctaaaattatctttatttttttattcacatcatcattataacatatagtgtatattatgggtctgtatctgactttaactttctttgtgtgtattggatgaagcaatgaaagtgagagaggccaattatgcgaacgctttgtgatgcttgtgagagcgccgggggtatagttttctgcgccgctgatgaggctgcactttgtcgtgcctgtgatgagaagggtcacatgtgcaacaagctagctagtaggcatgtgagggttggtgcttgtaggccaagtgatgtaccacggtgtgacatatgtgagaatgcacctgctttcttctattgggagacagatggaagctccttttggttgcagtgtgatatgattggtcatggt

SEQ ID NO: 29882 - DNA, 672 bp, Glycine max
  Clone ID: TF_GmC6837_2
atattgaagaaaattctgcagctgaagggcagccagagtagcaattgattgatgccttcttgtgtgtcgaagaaagatggtgaggtcccattgacccaacccaatcacagttctgacaaagtgaaatctttctcatcaacacactctcacaaatgcaggttgcgaattgcatctctcgcatacaagggttctcgaatgacgcctagaaagggcattagcagaatgaacatttcgatcacacgacaaacataagcacgcagcatcagagcggcagtacaccagggacctctggtctccacaaaaatcacataagtaacccatctttaaactgcctctacttttgctcctgaataagctgttggacaatatgatgaaggaagctttagttcagttctgcaaattcagctgcatacggcaagaaatacagagagaggacaagatcggtaaggaaaaggggtctgttgcttttttcagaaaaactataaaaataatatttttaagcaaaaattgaaagcaaaggaaccctagagaggtggtggagaaagctggacttttcagaagaacaaacacagaccctttgtgttttgtgttgtgtgtgtgactgtgtatctctctcgacgcgtggggctctcccgggagattccgggacccggtagcctgcagggcgtacca

SEQ ID NO: 29883 - DNA, 626 bp, Glycine max
  Clone ID: TF_GmC117_2
atgagttcggctactaagaacgcagcaaacgcggttgggggaaaaactgcaagagcatgtgacggctgcataacgaaacgtgcacgttggtactgtgctgccgatgatgcttttctctgccaggcttgtgactcttcggttcacttggcgaatcctttggctcgaagacacgaacgagtccgcttgaaaaccgcgtcgtacaagtccaccgatgaacgacgacaacctcccacgtggcacaccaagaaacctcgaacgcccagacatgggaaacattctcgtaacaacaaccctttccacttggtccctgaagagggttccgaagaggcgaattcccatgatgagaatgaggagcagctcgtttatagggtccccatagtcgacccttttgttgctgagctatgtgggactaatagttctccttcttctgttacttcaactgatcaaggggtagtagctgctgctgctgctgcttctgctgaggttgaatacaaagggattcaaagcaatgatttttgtagcaatagcaatgagatcgaaaacttgcatgggatgctttcttcggatgcagaacttgctgagtttgctgctgatgttgagagcttttgggtaagggggcttgaaaa

SEQ ID NO: 29884 - DNA, 1247 bp, Glycine max
  Clone ID: TF_GmC264_1
cgttgtttgagaatgcagcgcaaagcaggtggtaaattccatctaaagctaaatattggtgcgacacgcccattcaaccataccgtaccagcagaggaaagagagaaaatttcagaacaaaaaagaagcagaggaaaagagagatagagagagaagaaaagctgtgaagagaagagtctgaaatctgaatcataaataattggtttttgagatgaagaactgcgagttgtgcaagcttccggctcggactttctgcgagtcggaccaggctagcttatgctgggactgcgacgccaaggttcatggagccaacttcctcgtggaaagacacacgcgcacgctcctctgccacgcgtgccagtcgcccacgccgtggaaggcctccggcgccgccctcggaaacaccgtctcgctgtgcgagagatgcgccggcggaaccaccgaacaaggtcaagagagccaaggaggcaatgacgacgacatagacaccgacatagacaccgacgatgaggatgactacgatgagagcgaggacgaggttgccgccgacgaggaggacggagacaaccaggttgtcccttggtcctccgagccgccgccaccagccccgagctcttccagcagcgaagaatcggttagccggtgcaacaacgtggacgaggtttcgaccacattgaaacgccgtcgccaggaggacaatgattttcagggttggaattcgaataattggggatgtgaacggagcgaagtggagagaggaggttggttggttcggttgcggcggagaaccgccgatgatgtggcggttgagcaacggagtgctagagcggcgtctccagacggttgctgtggtgatagagcatctgaagacgtttgatctgaagggacacgaggaatctcaaccgcgtgatctacggggccgtaccattggatattatttatgggctctttgattattaactttctctaacgttacagcactcaggttttgataatggcaatcaagtgtatggatcgttttttttattattcctattattttttgttttgatattttgaggatcatggttgtgggggtgatgtaactctttacttctattttattgttgtaaaataacatttttttcttcttctgtttataagtaggtgaggatgctttatgttgtgatgaatacataggaaaaaccacgaagcaaatgaatgtgattccttattcatgataaaaaaaaaaaaaattatattcgttt

SEQ ID NO: 29885 - DNA, 172 bp, Glycine max
  Clone ID: TF_701038605H1
gtggcttttgagggaaaggagggaacttttagtgtgggagggtggaaactggaattgggtttggttgggggtaaagagaatgaagattcagtgtaacgtgtgtgaggctgcggaggccaaggttctgtgttgtgctgacgaggctgcgctgtgttgggagtgtgatgagaag

SEQ ID NO: 29886 - DNA, 1050 bp, Glycine max
  Clone ID: TF_GmC903_1
ggggcgagatttattttagtgccgcgacagagacaacaaagagagtgagaaactaaaaagagaagaggaaaaaaaaatggaggaatcatcaacaacatgcgtgttgtgcgagaagagggcaatgatgctctgcgactcggaccaggctaagctatgctgggaatgcgacgagaaagtccacagcgccaatttcttggtcgcgaaacattctagggttcttttatgtcgtttgtgtcactccccgactccgtggaaggcttcggggatgaaactcacgcccactgtgtcgttttgtaaccgctgcgttgcggaacggaacgcgaggtggaaccgattggtgaataatgaaaatgaacatcaacaacagcaacaacaacaacaacagagtgattttgtggtggatgatggtagggaatatggttctgatcatgtttttgatgatgacgatggtgattatagtgatgatagtggtgaagaagaagaagaggacgaggatgatgaagaggagaatgagaatcaagtggttccaatgtcttctggttctgccacgtcaccacctaaggttgcctgtttagcgttgaagcgattgagaaacaactcttttctgtcgattcttcacatgatgagacagcgtgctcttcatctgagatgcttagttctacattgcctagtggtgatgaatcaccctctttgagtagtgtattaaagaggcatcgggttgattagtgaaaattgaagaggttagaggtggtgacggtttgtgttgatgaacccaatttgatcgaaaattaatctggaccgttgaattgataggacaacttctgtttatagggcaacttcagattatgtttagtgttaacttccatctttctcttgaaactacttagtttatagaacaacttagattcagaaaaaaaattgttttctttttgcattcaatttttgtagccaaccccattgataataactctgtagttcacatttcatgatatatatgtatgtggagaatgtatatacttcaaatcctactttcattaattttcgccacct

SEQ ID NO: 29887 - DNA, 242 bp, Glycine max
  Clone ID: TF_LIB3094-087-Q1-K1-A12
tttcctttgtcttggctgtgactccaaagttcacgcagccaacaagcttgcctctcgccatgctcgtgtttgggtttgtgaagtctgtgagcaagctccggctcatgtaacctgtaaggctgacgctgccgctctctgcctcacttgcgaccacgatattcactctgctaatccgctcgcacgtcgtcatgaacgtgttccagttacgcctttctacgacacattcaactctgacaactcac

SEQ ID NO: 29888 - DNA, 1515 bp, Glycine max
  Clone ID: TF_GmC271_1
aaacgaaaagccattgttacaagcatttcacacttaacatatcaaaaaaacaaaggtttctactttctacgatgagagacatgaaagacgcaggtgccttgggaggcaagacagcaagagcctgcgacagctgcgtaagcagaagagcaaggtggttctgtgcagctgatgatgctttcctctgccatggctgcgacactttggttcattccgcgaaccagttagcaagcaggcacgaaagggttcggcttcaaactgcttcctcaaaagtaaccaccacgcacgcatggcacagtggattcacacgcaaggcaagaaccccgcgtcacaacagcaagcactttgcgctgcaacagcgtctcaaagacgaagttctcttcaacaacaccagtgttcttcccctcgtgccggagctcggaggggaagaacaagaaccggtggttgtggataacgatgagacggaggagcagatgctgtgtcgggtgcccgtgttcgacccttttgatgtgagaaccgatgacttggatagtttttctgacatggatttcgctgagtttgctgctgatgttgaaagcctacttgagaaagaagacgatgaaataagtgcgtatgtgggaaggggaggggggaagaagaaattgatggtgatgtagcgtgttatcgttaaggatgaagaagaaattgatggtgatgtagcgtgttatctggaatcggtttttgatgatgcctttcattggaataacattgagtctgtgctgtcagatgcacgggaagagaaggagggtgtggtggcgtgtgatgtaggtgtcggtgatgaagaaggaggaacaaagagagacatatttttgagactaaactatgatgaggttattactgcttggtctagccaaggttcttctccatggacaacttcaaacccacctaagttcaactctgattatgacttctccttgggtttgagtggtgtaggtggggaagtaagaagcttaagagggcacctagatggtggaagagaagcaagagtgtcaaggtatagagagaagagaaggactcgtttgtttgcaaagaagataagatatgaagtaaggaagttgaacgcagagaaaaggcctagaatgaaaggtcgttttgtgaagaggacatgctttgttggagccaatgcttttcctgcttaccactgacatcaatcaattaacggatccatctttgctttttctgcaaatttgggttaatacttggtttggctatatatatgtacgtatatatagcctgtattatataaatactagtaaataatattactgggccaggttaattttactagaattgttgcttgggatatttctgtctatatatatctctagacaggtttagtaattagtactaattaatgatcatctttattggcaggtttaagccttttggaatcccttttcattgtttcttattagaaattcaattgttcaatgctgatgctgttatttgctagccagttgatatttcacgctgctgatt

SEQ ID NO: 29889 - DNA, 859 bp, Glycine max
  Clone ID: TF_GmC271_2
aaaaaactaaggtttctacctttctacgatgagagacatgaaagacgcaggtgccttgggaggcaagacagcaagagcctgcgacagctgcgtaagcagaagagcaaggtggttctgtgcagctgatgatgctttcctctgccatggctgcgacactttggttcattccgcgaaccagttagcaagcaggcacgaaagggttcggcttcaaactgcttcctcaaaagtaaccaccacgcacgcatggcacagtggattcacacgcaaggcaagaaccccgcgtcacaacagcaagcactttgcgctgcaacagcgtctcaaagacgaagttctcttcaacaagaaccggtggttgtggataacgatgagacggaggaacagatgctgtgtcgcgtgcccgtgttcgacccttttgatgtgagaaccgatgacttggatagcttttctgacatggatttttctgagtttgctgctgatgttgaaggccggcttgacaaagaagacgatgaaataagtgcgtatgtgggaggaggagagggagttcaaggtgtattggccaaggttaagggcgaagaagaaattgatggtgatgtagcgtgttatctggagtcagtttttgacatgatcagtgatgatgcctttcattggaataatattgagtctgtggtgtcagatgccccggaagagaaagggtgtgtggtgccatgtgaaggtggggttagggaacaaggaggaataaagggagacatatttttgagactaaactattaatgagggtattactgcttggtctaagcaaggttctttcccatggacaactttaaacccaccttaagttaactttgattatgactttttc

SEQ ID NO: 29890 - DNA, 690 bp, Glycine max
  Clone ID: TF_GmC226050_1
caacggaattcccggcgcgacccacgcgtccggaaatatcttttcctcctcgttgtccccactggtccatttcacaattgagattttgcgttcagcttcctcccatgcttatcaccattcaccattcaccaccatgttgccatgcgattactgccattccaaacccgccatactcttctgcagaccagattccgctaaactatgcttgctatgcgaccagcacgtgcacgccgccaacgccctctccctcaagcacgtgcgcttccagatttgcgactcctgcaagaccgacaccgctgtcctccgctgctccaccgacaacctcgtcctctgccaccactgcgatgttgaaacccacggtgctgccgcttcctcccaccaccaacgtcaccgcctccacggcctctccggctgcccctccgtcacggagatcgcctccgcgctgtgcctcgatttccgggcccaggatcccgtggtccccaccgccgcctccggcggtcgcgatgaggtgtacgagcaggtgctggaaatcgcgcggcagaggaacgacgacctcggcgccgaacaactcaagttcgacgaatcccccataaacgacgtcgttgttgttgacgagatgctgatgcagcaaacgccgttcacgtctttgctttatgtgccgaattccgaatctgaattccactcccgaaa

SEQ ID NO: 29891 - DNA, 1181 bp, Glycine max
  Clone ID: TF_GmC24129_3
gaaaacccacgtttttgttttctgtgtgtattttttttatatacaatttctgtattaattcaaagttaatgtttttctgagcatgggactttttatgggggatcaaggcaaagaaaaaattcggcttctgcatcttcagatagggagggggaacttctctatttttcacggcatattgtggtttgtaaagactgttactaggtggagattccttagtttacactaaggggcaagagaaaagtgagtctaaagatgggctatatatgtgatttctgtggagaccagagatccatggtgtactgccgctctgatgctgcatgcttatgtttgtcttgtgatcggaatgttcattctgctaatgccctttctaagcgtcattcacgcacccttttatgtgagagatgcaattcacaacctgcctttgtaaggtgtgttgaagagaaaatttcactttgtcagaattgtgattggttgggtcatggcacctctacatcttcttcaacacaggctcgagaagcaatcaattgctactctggctgcccttcagcggcagaactgtcttcgatatggtcatttgtgttagaaatcgctgccataagtgagtctacatgtgagcaagaactaggcttaatgagtattaatgagaacaagtgtgttggtgttcctccggaagaccagaatgtgtctggttcagatgaagttaccgatctacctgctttgaacaagtctttggttggtgcatctttgatgcctgaatcaagctccgaaccttgtattctggaccagccagctggacctaccaatgaatgtctgccaaagttatactgtcctgctacaaaatgccctgccttatctgaagatgataatctgtatgatgatttcaacatggatgaagtggatctagatcttgagaactatgaagaactttttggtatggccctcagtcattctgaggagctttttgaaaatggtggaattgatagcttgtttgggacaaaaggcatgtctgctggagattccaattgtcaggaagctattgctgctgaggtgctaaactctagctatcttttgtctgtgataatcatggctttttttactaatggagcatcacatgttatgttctgtatacttcatagatgatgttcttgtgtattcacaaatgtgcatttgttttctccttg

SEQ ID NO: 29892 - DNA, 651 bp, Glycine max
  Clone ID: TF_GmC723795_1
ccgcaccgcttcccggcctttcctttaccgtacggatgttgcagcatatctttgtctttcctgtgatgcaaaggtgcatttagcaaatgcagtgtccggccggcacctccggaacctcctgtgtaactcatgcggataccaccttgcttatgttctgtgtttggaacacaaaatataatttcatagcttttttcatgtttggaattgaagactaaggaaatggagaaggtttgtgaattctgcacagctttgaggccacttgtttactgtaaggctgatgcagcatatctttgtctatcctgtgattcataggtgcatttagcgtctgcagcgtctggccggcacctccggaacttctgtgtgccactcatgcggataccatcttgcttatgttctgtgtttggaacataaaatgttgatctgtcgtgactgtgatcaaaagttgcataacctttctttaccacataagaaacgagctatcagaagtttcatgggctgcccttctgctaaagactttgcagcactctgggggtttgaatcgaatgagattgaaaactattctgctcaggatcagtttggttcagtttcttgtgtttctgcagatttgaatgttgcacaagtttcaggaaagcctggcattcaaactgggat

SEQ ID NO: 29893 - DNA, 843 bp, Glycine max
  Clone ID: TF_GmC24129_4
caccatttgcattattcttctcttcttttcttttatatctgatctacatttatctatattctcttctcttctcgtccgaccttctcaacagtcttattagcagagagcacaagagaggacagggaaaacagaaaaaaaaagtaagagagagaaagagaaatctgggtgatttctgttgttctcttgaaagagttcagctgcttctactatttctacttctagggctttctttgttttgctttgcttaaaagttttgcataaaaataaataaatatttttctttttcttcttcttctgaaaaagcaaatcccttttgcttaccgatcttgttctcattgtcttccttgccgtgagaattcggcttctgcatcttcagataagaagggggaacttctctattttttgcggcatatcgtggtttgtaaagactgtttctaggtggagattcattaattgacactaaggtgcaagagaaaagtgagtctaaagatgggttatatatgtgatttttgtggagaccagagatccatggtgtactgccgctctgacgctgcatgcttatgtttgtcttgtgatcggaatgttcattctgctaatgccctttctaagcgtcattcacgcacccttttatgcgagagatgcaattcacaacctgcctttgtaaggtgtgttgaagagaagatttcactttgtcagaattgcgactggttgggtcatggcacctctacatcttcttcacacataagagacaagcaatcaattgctactctggctgcccttcagcggcagaactgtcttcgatatggtcattttgtgttagaaatcgctgccataagtgagtct

SEQ ID NO: 29894 - DNA, 1415 bp, Glycine max
  Clone ID: TF_GmC38808_1
ggtgggcccgcgcggccctcgagtcttgccaacacttccttccttacttactttatgtcttgtccaaaacaccacacattaactccccgaatgttggagggccaagcaacaatgcgcacgtgggcgcgcatgtgcgacacgtgccgttcggtcccctccaccgtgttctgccgctcccacaccgcctttctctgcgccacgtgcgacactcgcctccacgtctctctcacgtggcacgagcgcgtgtgggtgtgcgaggcctgcgagcgcgccccggcggcgttcctctgcaaggccgacgccgtctgcctctgcgcctactgcgacgccgacatccacgcctgcaaccccctcgccagctcccaccaccccgtccccatcctccccatccacgcccgccacaacaacaacaacgacgacgacgacgttgctgacgtcgacgacgaagacgaaaccgcttcatggctcttgctcaaccctatcaagagtgctactgtccctaacaccaataaccataacaataataacgggttcttgtataacgaagaggttgatgagtatttggaccttattgataattgttaatcttgtctcgataataatcacttcgcttcagctgctgctactactgatcattacgctcagcaccaacatttcgctggtgtttctcagaagagttatgctggggacagtgttgttccggttcagcaacaccagcattttcagcttgggttggagtttgacaactccaaacctgccttcagttacaatggttctgttagtcaaagtgtttcagtttcatcaatggatattggtgttgtacctgaatcaccaatgagggatgtctcaattgcccatacaagaccccccaaagggacaattgacctattttctggacctccaattcaggtgccttcccatttttctccaatggacagggaggccagagtcctaaggtacagggagaaaaagaagatgagaaaatttgagaagacaatcaggtatgcctcaaggaaggcctatgcagagactagacctcgtataaaaggtcgatttgccaagagaacagatgtagaagctgaagtggatcagatgttctcgacaacactaattacagaagttggatatggaattgttccctctttctgaatatgctgtgttgaacaaatggccagaagatatcgaagatgctagaggatcatgatcaatagaaatggctaccacttgtgtactaataatgtattttttatgtaatctaattacttgcagttgtactaatcggatgctttattattttgtttattgtcttttgaatgaaacttgtacttgtaaatacagtccatgtattaaattattaaattacagtcaacatatctttgaaaaaaaaagcgaaaatttttcattttctcaatttc

SEQ ID NO: 29895 - DNA, 505 bp, Glycine max
  Clone ID: TF_GmC162685_1
gttctccaaattcaaaacagagaacatgtgactattgcgggagcttcacggctcttctgtactgcagagccgattctgcgaagctttgtttcttctgtgaccgtaaagttcacttcccaaaccagcttttctcgaagcacaagcgcgcgcagctctgtgatgcgtgtggagattcccctgcctcggtgctctgttctgcagaaaactctgttctgtgccaaaactgtgattgcggaaagcaaaaacatttggcgtctgaggcgcaccaacggaggccactcgaggggttctcggggtgcccttctgtgactgagttgttaacaattctgggtctcagtgaaaaatctctgctttcaaatgagggaacttcccagattgatgatgacctttcggatttgcacgtgtggagtgctccttctattaatggtcttgaagatttgatcactaccacagcttcttctcaaaaggaacgtgtgggtgcgtgcgggagacacaaagaagagat

SEQ ID NO: 29896 - DNA, 2125 bp, Glycine max
  unsure (1)..(2125): unsure at all n locations
  Clone ID: TF_GmC919_1
ctccctcgtaaccaaaagccatttccaactcaaaaaacatggctccttttcctcttatgtgcttcgttattttgctcctatcctccactgtttcagtcacagccaccgccacccaaacaaccttaacagtgggaaaactcgaccaagttccacacataatgtgcaaggagtgcgagcttccacccccaccccctaaagagtgtcctccgccgccgataccactagcacctccaccaccgttaccaccatcaccttcaccaccgttaccaccatcacctccaccaccgttaccaccatcaccttccgcaaccttaccggcacctataccgctaactcactcactccccaaactcattcaagtcgctaatcctagttccttcaactcctcgctggcaacaacagcagtactaccattagccgcgtttttcaaaagtgattttcgagaattagcgatgggaattgaaagaggaggcttcaagggattcaggagcgcctggagcgtgccgcccaagccgtgcgattcctgcaagctggcctcggcggcgcttttctgccgccccgattccgcgtttctctgcatcgcctgcgattccaacattcactgctcgaacaaactcgcgtcgcgccacgagcgcgtgtggatgtgtgaggtgtgcgagcaggcacccgctgctgtcacgtgcaaggccgacgccgccgccctctgcgtcacgtgtgactccgacatccactccgcgaaccccctcgcgcaacgccacgagcgcgtccccgtggaacctttctttgactccgctgagtccatagtgaaagcctctgctgccgccaccttcgggttcattgtcccatccgacgacggcggcgcctccgacgctttcgcccccgatgactccgacgccgccgcgtggctcatcccgaaccctaatttcgggtccaagctcatggacgcccccgaaatcaagtccaaggagatattcttctctgaaatggaccccttcctcgattttgattactcaaactccttccaaaaccacaacagcgccggaaacgacagcgtcgttccagttcaaaaaccctctctcgcccctcccctaatcaataatcaccaccaccaccaatcagaaacttgcttcgacgtcgatttttgtcgctcgaagctctcctcctttaactacccttccaattctcttagccaaagcgtttcgtcgtcgtcgcttgatgttggagtggtgccggacgggaacacggtgtcagacatgtcgtattcttttggtcggaacagttcggattcgagtgggattgttgttgtgtcaggaaatagtgtggggcaaggtgcgacgcagttgtgtggaatggatcgggaagcgagggtactgcgatacagagagaaaaggaagaaccgaaaattcgagaagacaattcgatacgcatcgcgaaaagcatatgcggaaacccggcccaggataaaaggccgcttcgccaaacgaacagaaattgactcggatgtggagcgtctctatagccctggccctgcggtgctcatgctggacactccatacggcgtcgtaccatcgttttagttaatttcaaaatgaagaaacgatggagtgcatgaatcttagaataatgattagcgattctgtgggattgttaggggaaaaaggtgaagaatcgaatcggtacgaacgtgattcttagctggagcgcgatgggggaagattattgtgaagatttgtctcgatcgaccagaaaagcccgtttactttttataaaaaaaaaaacaacgtgcttttttaaggggtctactgtttaatattctcactgccttgcctgcttctgtctttcttagtattaaagtgtcttttttttgctcagctatatcacggatctctttccccattcctattggctgtcctccccaactatatatatatatcacttttttaattcattaccatcatcatttaacacttcacttttttattatatactcctcatcaaaattccaaggtcacaccaagccaattttcggtctatgattccctaatattcatttaagaaatacttgtgctttatttactcttttatgttaacatttcaattactgttgagcattnnnantccaaga

SEQ ID NO: 29897 - DNA, 215 bp, Glycine max
  Clone ID: TF_LIB3138-069-P1-N1-A9
attcacagtttatcaaaactatcatacccacatggattggcgatgaatgtgagagagtccaattattcaaacgctttgtgatgcttgtgagagcgcccaggctatagttatttgcgcctctgataaggctgcactttgtctagcctgtgatgagaagattaatctttttgagcttacaggatcacatgtgcaacaagctatctcgtacgtatgtt

SEQ ID NO: 29898 - DNA, 412 bp, Glycine max
  Clone ID: TF_LIB3242-471-P1-J1-G3
caagaaactaccaagtagcaagcttgattattattatcatcacatagagcttctgaaaatgtgcaaaggtgcagaaggagaaaagcaacatgggttctgcagcagctttctacataaagagagtgcaaccagaagtgctatatgttgtgagctatgtgggttacaggcttcattgtattgccaagctgatgatgcctacttgtgtaaaaaatgcgataaacgggttcatgaagctaattttttggcccttaggcacattaggtgctttctgtgcaacacatgtcagaaccttacgcgaagatatctcattggagcatcactagaggtggttcttccggccaatataaactggaccattagaaatctccttaacaacagaggaatctacagaaagtgttcaagaatgcataac

SEQ ID NO: 29899 - DNA, 519 bp, Glycine max
  Clone ID: TF_GmC906_4
gcataaccaataattgaatttgaatcatttgggtctctagacacaaacactaccccctctttccccctcctcaacattgttatgatcccttgttggtaaccattccatttgcacttgtctttgcaaccaaaaaacaagctctatgaccaacgaaatgaaagaagcaagtgccttaggagctagaacagcacgagcatgcgagagctgcctaaaagtaagagcacggtggtattgtgcagctgatgatgcattcctttgccatggctgtgacaacatggttcactcagcaaaccaattagcaagtagacacgaaagggttaagcttcaaactgcatcctctaaggtcaactactcagtgacccctaaggtagcatggcacagtggattcacacgcaaggcaagaacgccacgccacaacaacaacagacactcatcattgaaacaacaacaacaaaaaaaaccattacatgaagaacgaggagaggaagaagtgtttttcaataacactattagtcttct

SEQ ID NO: 29900 - DNA, 310 bp, Glycine max
  Clone ID: TF_LIB3028-010-Q1-B1-A12
atatgtcctaaactttctgcagcatcgttctccatttttggctttacagaatgactgtgtctgattaagggttctttagtatttccaatatttcttgtagtgaataagttgttagctaaatcaagatcaagtttttggtgttgtagaaggaagagaagaattaacatgagtattcactgtgaagtgtgtgagacagctccaggagcagtgatttgttgcgcggatgaagctgctttgtgtgccaagtgtgacgttgaagttcatggctcaaacaagcttgatcgcaagcatgaaacacctcttcttcaat

SEQ ID NO: 29901 - DNA, 733 bp, Glycine max
  Clone ID: TF_GmC36880_2
ggggagcggaggatgttgcggcggcgccgcaacaagactctgcgctcgctgcgaatccgttgattattgctctctctctcaccagattgcacactggaatcgtcacaaacacgagtgtgataggttgcaacagcaattgaaaagtgttgaagtcctcaacgattttcccttcactttctctcgcgaatccacgtttcaggtttgtgtgaagcaggaaactaggtgttcatttttgagcaagagaggtcttcatcaagtggaaatgtggatgcatgaatgcgcttgtggggcatcctctgcttcatttgattgtttagggtttcttcatatttccttcattttctgaaatatcagttatgagttcctttttgaaaaatccagtgattaagccatatataatacatctaatgattattcagttacaacttacaaccttttcagctagtttattagtttagagcaaacttaagctgaaatttattttttgcattaaacaatggttgggatctcccaagtaatttatgtctctgttgtgagcctagctctccggtatcagagcagttgcattgttggagagactactataagtggagatgcatcccgctagactcgcctgttgctttgcttcttcaatgggacctgagaaagagctgctacaacttgctgtgtttggagaattactggcactcttccccggtgtacgaaatcatatagaacttgttggacctgcaat

SEQ ID NO: 29902 - DNA, 730 bp, Glycine max
  Clone ID: TF_LIB4201-003-Q1-K2-F7
ccacgcgtccgcattgtcgtcgtctcggtttcttcccttctcgtggcagatgaggttggaagactagcacttttttgtttattcctaaatacatggacactgatgccactggagatcctgttgacaagctcaaggctatccagaatgatgatgtagaatatcaagacgaagatgatgattttgatgacgaagaagaagaagaagatgaccctattactcttggtttcgttgacaaacccaagaatgaatggtctcttcgccgtcaatatttcccaagcaaaactggtggagtcccggcttggcttgaccctctgaatataccatcagggagatcatctgtgtgtgacatttgtggagatcctttacaactcttgcttcaggtttatgcaccaactgacaaggaaaccacatttcaccgaatgttgtttgtttttatgtgtccctccatgaaatgtcttcttagggatcagcatgagcaatggaaacgccatccagagaagccatctagaagtgtgaaggttttccgttgtcaactaccccgcattaatccattttactcacctgaatgccctcagtataatgagagccacgaacctgctggcagtggagctgctctttgtgattggtgtggcacctggaaaggagacaagctttgtagtagttgcagacaagcacggtattgctctgagaaacaccaggctatgagttggcgcacagggcataaaactgc

SEQ ID NO: 29903 - DNA, 1576 bp, Glycine max
  Clone ID: TF_GmC165_1
gctcgagacctagggaggacacattcaatgacacaaaagcatactcaagtactggcttgagacagtgtgcaatgtgtgagaaagaagtgtatggagaacagtctatttgctgtggccggtgtagagcagttgtttactgcagttcaatctgccagaagcaacactggaacgacacacataaaagcatgtgtggactttacaaggccatgatggagagggaagaagagctggctataatgattttcatgttcccatgttctgctgaccagccttgtaagtggcttgaatcattaggtatccaccagaagggtatgtggaggagaaagtgcagttgctattctcactgctcttttggtctccttcctgtgaaaggtgggctgcaggaactatggggtggaattgatgaatttgaataccctcatgactctccatttaataaccatttcatctcaagcccgtttcttctctctggttggcccgagtactacaaccttcgttcgcttccattgtcaagtcctgttgccgacattctctcgcatccattgactgtgtatcacatactaactacccttaatataagttcaaagaaccttatactgaaagggaaagaggtgattgtccactaccttggacctgaaggcgagttggattggatgccagcatttgcagaagtaggacacttgcttaatgggttaggcaatgtacaaatagtgatggtgggaccagaagttccaacaaatttatcgggtacaacctcaggaattggtagcagagttagagtgaatcttgtgaggggtgtttatcaggtggaagcctcctacctaccttctccacatgttgtcattgctctgaattctagattagaaagctattctagttggggtggagctcttgatgtaatcaaatcaattggggtgcctgccttcttcactgatcaatccgaagtttcatgtgtaaatgctaaacaagtccttcggaatgctggactgcacatcacacatccggtgactccaaatcctttccggtcacctgtgaaaaatctcacagcttctagcaatcttccttcatacagcaatggttttgtctttggggtgaatacttgaatgcagtccaagaaaatccaaaaacaagtgtctgtctactgtcatgcattctcaagattgcagccaacttcaaattttctcgattgtcgtgcaatttgctgaacatcacagtcacagcaaactacaaagatcattgtatgtctcattgaataatgtatattgatttcagtttagccagagatcttgttatagtctctgagttatggaccctgtggtttttatataattttttatgtagagcctccagtgggctgagttctttggttgttttccccttatcacattgaagtttatctgtttatgtcacttatctctcctaaaatcttgttcagaatcctcagaaccttgtctgtataagttgaaatcaaatgtcagttgttgtggtaaatcaataccattctgctcaacccgtagtggcccaattgttttggagagaaataaaccaatgttgcagttgctattcacactgccct

SEQ ID NO: 29904 - DNA, 1691 bp, Glycine max
  Clone ID: TF_700665732_FLI
ggcgccctctatcattgtcgtcgtctcggtttcttcccttctcgtggcagatgaggttggaaggtcagaaaccgaaccgtctaacccacacaaacacaacccagatactataattgactagcacttttttgtttattcctaaatacatggacactgatgccactggagatcctgttgacaagctcaaggctatccagaatgatgatgtagaatatcaagacgaagatgatgattttgatgacgaagaagaagaagaagatgaccctattactcttggtttcgttgacaaacccaagaatgaatggtctcttcgccgtcaatatttcccaagcaaaactggtggagtcccggcttggcttgaccctctgaatataccatcagggagatcatctgtgtgtgacatttgtggagatcctttacaactcttgcttcaggtttatgcaccaactgacaaggaaaccacatttcaccgaatgttgtttgtttttatgtgtccctccatgaaatgtcttcttagggatcagcatgagcaatggaaacgccatccagagaagccatctagaagtgtgaaggttttccgttgtcaactaccccgcattaatccattttactcacctgaatgccctcagtataatgagagccacgaacctgctggcagtggagctgctctttgtgattggtgtggcacctggaaaggagacaagctttgtagtagttgcagacaagcacggtattgctctgagaaacaccaggtaactgaattacttaaatgtattatgtatccttattttttcttccacaaatttgatttccatgacattccttttctcttccaactcacaggctatgagttggcgcacagggcataaaactgcttgccaacagatgaaagtttcttcacctgtttttggacccaacaaaagtggaaccacctccttggagtctcataaagttggaagcaagaatctgtggcctgaatttgagatcagcattgaagatgaaagtgaatataatagggacatatctgaggaaaatagcttagctaattccttgatctctaggaacaggaatgatgacacaatgaattcacttatggataactttaagggtgatgatgacaaaaagagctgggcctccttccaggaacgcattgccgaggctcctgaacaagtgttgaggtattataggaatactaatgccaagccaatatggcctgtttcaagtggtcgaccatccaatgctgatatccctaaatgcagttactgcagtggaccaatgtcttgtgaatttcagattttgccacaactgctctattacttcggcgttgacaacgaagtggactctctggattgggcttcaattgtggtgtatgcgtgtgaagcctcttgtgaagcaagtttgccttacaaaaatgaatttgcttgggtacaaatttattcactttccacaaccttatagagaaatgtctttttttttttaatttttttatataaattattatcgtttttaaattttgggctcagaagtatatgttattcttcgtttgacttggtggaagtatgaggaaggattttctttatctacttcaactatcaattttgaggattggctgttgattgtgtaatttataggataggcttgattaggatgtgtacgtttttcactgaaaaaatgataattaattttgctac

SEQ ID NO: 29905 - DNA, 2052 bp, Glycine max
  Clone ID: TF_GmC5714_1
gcggcgcgcccgtgccgttttggagattcattacattaccctcttatatataacttgttacttagatttttcttcttctttttttatctctcaacggagagacagaaaaaaagaaagaacgagagagtgattaattagagggacatgagaacaaggagaggtgcgtgttatcctggtgtagtctcaaggatgtgctccaatgtgagggttacgaagaaaaaaagcaaggatctgcacatgcatatgcatgttcctgccggagactccattatttatagccggaaaaagcagaagaaaacgccggaaaaactcgccgccggtcgttacgattttttcgagtccttgccggatgacctcgtaatctccatcttctgcaagcttagttccaccgccactaaaccttccgatttcgtcaatgttttaatcacgtccaaaagattaaacagattagcacttcattcgcttgtattatccaaagcctcgccgagaactttcactattaaagcaaaatattggtgcgattcggcacacaaattcctcaaacactgtgccgatgccggaaacgttgaagcttgctatactttaggtatgattcggttctactgtttgcaaaaccgagggagcggcgcgtcgtttatggcgaaggcggcgattaactctcacgcgcgggctctgtatgcgctggccgtgattcagttcaacggcagcgggggcacgaagagcgacaaggacctacgcgccggcgtggcgctatgcgccagagcggcgtttctcggccacgtcgacgcgctgcgcgagctcggccactgcctgcaggacggttacggcgtgcggcagaacatcgccgagggacggcggttcctcgtgcaggccaacgcgcgtgagctcgccgccgtgctgtccaccggcgccgccgcgcgtaccttgctgagttggaatcttcagccgcagcagctccggcaggggtccgggtgtccgcttctcagcgatttcggatgcaacgtgccggcgccggatgtgatggcggagtggttcgtcgcgcggggcggttcgccgggaccggggctgagactctgttctcacgcggggctctgttctaacgcggggtgcgggaggcccgagacgaggaagcacgagtttcgaaggtgttctgtgtgcggcgaggtgaattattgctcacgcgcgtgccaagcgcttgattggaagttccggcacaaagcggagtgcgcccccgtggagcgatggctcgacgaggacggcgaagatgtcggtaacgacgacggtgacggagaggtcgaggttgttatggtagatagttagacaatttttacaacagtaacggcaacggaagtcgctttggacggaaaatgaatctatttttggcgaagagaaattacttgtcgtgatttattcgccgtctcaaaaaggtagagagaatatggcttcttttcgttttttccttgtatagtttgaaaattctcccgaaaaaaaaaaaagacgaggggagattatttttctttttttttttgttgcaatttcggagtttaacgttaattagaaattagaaattcaatgctaagaggttactagttactaatttttgttattaatttaatcgatttgaacgtaattagtagctttgaagttttcttttattatatgagtagcttttattaaaacttgagattcacttaaatatattttacgtttttttttaatttaaatgtagtactatactcccctcttatattattataatatatattttacagtttaatagttactctattttgtttggatttgagattttagcggatacgacaaaattaaatgtgatttggtgagctgtgatttgtctctattgatttaatgcggcgccatcgcataaggttgaaaaatgaatagttgtgaaaataaatctaatcagttcacggacatcagattttgctttcatacaattttacctctcccctcacatgcatgagatgattacagagggttgattgattctatgcgatccaacaacttgttagtggcgtaaagaaaatatta

SEQ ID NO: 29906 - DNA, 3449 bp, Glycine max
  Clone ID: TF_GmC3960_1
ggtgggttgaggagagattaaggaatccttttgaccgttgaaaaggtgaaacgggtgaagtgttggaggtttttccttttattcttccctttcttgaaggttttgatagccaggaattgggtaatgctacacttgaaatttctgcatagtacgtgcttgattagttggaattttaggggaccctattctgacatgcgtttttggaagaaatctaggctttgtgattcttattcgcgtaatctcgaacagagaaaatctgattgagctgtagtgtttccgatcttggctgtgcttgcctgggggaccatctttctacttggaaaatggagtgaaactagtaagaagagagataggataaatttgcttgcccatttggctgctgaagaagctctaagagctgaagaaatggccgtggctgatgtaattcctccagtgtctgcttcaaaaaatgaacatcatgtgtgtgctaggtgctctgctccagccagaactcgctgctccagatgcaaaattgttagatattgctctggaaattgtcaaataatccattggaggctaattcacaagcaagaatgccagcaactggaacctcataaagacctgaccttggagatattgggttgggttgagtcactggaagatgcgctgactcagtttacttcccctgaagatttggatggagagaatatgtacagatgtggaaggtgcacatcatatgttcgagctagaaagcaactgagcatacatggcactgctgctcctactacagctgatttttctgtatttaataactttcaacattctgcttttgaaagaacttcacataaatccaacagagaaacattgagaagagataatggctctatatatgaatcttctattgaatcttctgattataaagctagcagttctctctcaagtgtggtaccaaaggaggcgtttatgagacagaagtcaagaaagagcagtgattctgtgttggaagaagaaatttcaatggtgtattcccagtgctatgtaatttatacatgtcagaatgagcatatatactattctacatgaggtcctgtccccgtccaaaggtagaacatactatgaatgccatgcagcaacctgtatatgattcttaatagcacaatccaatggaaatgcagaaacctaataaaccaggacatagtaggcatggcagtcgtcagttttttgtcccagagccatcacctaatactaggccagaaatcaccactcacattattgacaccaccaatggcttccttagaaaaagcaccaataggaatgccctgccggtgacccaaacttatgccgaaaacgtcaggcgtgagttttcagatgccacatcaagtgactggtcccttttcactagctcagatgaggcttctttcacaactgagagcaccagggactccttcagcactgtagactatggtgattcatgcaacatggatccaatttcatctatcttcaactacccctcagaaaagtcctacttgaagttttcacatagtaggccagttaccagggtcttccctgaaaagggtcatgttaaacaagtacagaggattgatcattccaaaagggtcagccattcttcttcaaatgagcatccactttggcatataccccaggggcctgttaaattgtgggaacagttgctatgccaatgctgtcttgcagtgcttaacttctacaaagcctctagttgtctatttgctttatagatcgcactcaaaagcttgttgtgctaaagattggtgtctcatgtgtgagttagagcaacacataatgattttaagagaaaatggggatcctctatctcctagtcggatactttggcatatgcggagcattaactgccatatgggtgaaggaaatcaagaagatgcccatgaatttttaaggcttctaattgcatcaatgcaatctatatgcttggagggacttggtggtgagaaaaaagttgatcctagaatacaagaaacaactttcatacaacatacttttggtggccgtcttcaatccaaggttaagtgtttgaattgtaatcatgaatcagaaaggtatgagaacattatggacctgaccttggagatattgggttgggttgagtcactggaagatgcgctgactcagtttacttcccctgaagatttggatggagagaatatgtacagatgtggaaggtgcacatcatatgttcgagctagaaagcaactgagcatacatgaggctcctaacatcttgactatagttctgaagagatttcaggaaggaagatatgggaaaattaacaagtgcataacttttcctgaaatgctggatatgattcctttcatgaccgggacgggtgatattccaccactttacatgctttatgctgttgttgtgcacctggacacactaaatgcatctttctctggacactatgtttcatatgtgaaagatctgcaaggcaattggttcagaatagatgatattgaggttcagccagtactagttaatcaggtcatgtcagaaggagcatatatcttattctacatgaggtcttgtccccgtcctccggtggaacatactgtgaaagctgtgcagcaatcagtttatgattcttcaaagcacaatccaatggaaatgcagaaacctaataaaccaggacatagcaggcatggcagtcatcagttttttgtctcagagtcatcacccaatgcgaggccagaaatttccactcacattattgacaccaccaatggcttccttagaaaaagcaccaataggaatgccctgccggtgacccaaacttacgccaaaaatgtcaggagtgagttctctgacaccacctcaagcgactggtcccttttcacaagctcggatgaggcttctttcacaactgagagcaccagggactccttcagcactgtagactatggtgattcatgcaacatggatccaatttcatcaatcttcaactaccccccagaaaagtcctacttgaagttttcacatagtaggccagttaccagggtcttccctgaaaagggtcatgttaaacaagtacagaggattgatcattccaaaagggtcagccattcttcttcaaatgaacatccaccaaatgggaattgtggcatgtatgtatattatgggagtaatcctgtgtgtggtactacccagacttctagtcagtgtgaattttagtctttggggaatcctaacttgttgaactgattattagatgcagtaggtgctgtgcctcaaagttttcaatacttagttgattgaggcatatagttcttttaagcacagatgtattttttttttgttattgataattgtaaagatgacggcatcgatcctttagttatctattaatccatcagtcttttcctagtggtatcactgttcaatttcatatttgagactatttttaaacttgagtt

SEQ ID NO: 29907 - DNA, 708 bp, Glycine max
  Clone ID: TF_LIB4198-004-Q1-K1-B8
cacgcgtccgggggaataaggaatcttttgaagggtgaagagagtaaagaggtgaagtgttggtgggttttgctcagatttcttctctgtgttgaggatgatacttgacaggtttgaatgctggggaatgggttatgctgcacttgaagtttctgtttactcagatgctgattacttagacttttaggggatgatattctgattagtgattttgggaggaaactggacatgagtatgcttgtggggatatgctcgaaccgcgagaatctgatatacctgtcctgtttctggtcctggttgtgcttcccttggtggcttacatcttacttggaaaatggagtgaaactagtaagaagagagataggataaatttgcttgcccatttggctgctgaagaagctctaagagctgaagaaatggccgtggctgatgtaattcctccagtgtctgcttcaaaaaatgaacatcatgtgtgtgctaggtgctctgctccagccagaactcgctgctccagatgcaaaattgttagatattgctctggaaattgtcaaataatccattggaggctaattcacaagcaagaatgccagcaactggaacctcataaatcaagctcatttcctctggctgtttcagttgaggaatttggtcatggggatggtagttacttttatgaaaatttgaacaaccagttcttaagtccctctt

SEQ ID NO: 29908 - DNA, 1752 bp, Glycine max
  Clone ID: TF_GmC3636_2
atttcaagtaatcgtatttaaaataatagaataaattccaccgaacctttataaaagttacagcaatctatatctacatctagttagtggctcgagaaagtcctaccactactccacactttcttataagttataacaatcaacccactctcagattacgctctgttgaatgaaaagctaaggaatatgagaaggccatggaagcattctaagaacaaacatgatctctttgaatgtcttccggacgatctcgttgttcttattctttccaagctcagcgccaccgcttcatctccttccgatttcatcaacatcatcttaacatgcaagaggctaaaccgctcaggcctgcaccgtcttgtgttgtctaaagctgggcccaaagtattcgccataaagccgaaaaattggtcagaatatgctcactcttttctcaaacactgcgtcaatgccggtaacgtggatgcctgttacactctcggaatgatccgattttactgtttgaaaaaccgagggagcgggctctcgttaatggcgagcctgcgtaaccggtccggattcccggtcctctacgcgtccgcagtgattcagttaacggtagcggcggttcaaagcgcgataaagatctacgcgctggcgtggccttgtcggcgcgtgcatctttactcggccacatcgacgcgcttcgggagttaggccattgccttcaagacggatacggcgtgcggcagaacgtcaccgaggggagaaggctcctcgtgcaggccaacgtgcgcgagctcgcgtatgtcctacgcgccgtggcgcctccttcgcgctgctgcgacgagtcctcctcgctgctgacgtggggcgcgctgagatgtcagagaaaaaacaacaacgcggtgtcatcactggcgtgtccgttgctgagtgattacggttacagcgtggcgccgccggaagtgcaaccggcgaattggtttctgagagagtggtttgagtcaggtaaggggaaattagaagaaggactgaggctttgcgcgcacattgggtgcggtcgaccggagacgcggccacacgagtttcgccggtgttcggtttgcggcaaagtgaattactgttcacgtggatgtcaggcgctggattggaagttgcggcataagattgagtgttcgccggtggaaatgtacggtgatggtggtgttgatgtggagaatgagtttgtggtcccaaacgatgccgtttgaagaagtgtttcagcgacagaatcaatttctaaggttgaaaaataagaaaatagagaggaaaagaagcgattctataaattaaaaaaaaaatgtcaatcagttggtatgtactatgtacagatgaggtagtaacttttatatatatgtatatatatttatggacaactaagattaaaagttctttattataaaggtcctatgtatggggcgggtgctgcctcaagaaaggagcatgagaagccacacatgaatcgtcgttgaaattcaagttattgctattggtgatgaagaaaggcttgctatcactttgccttctctatttgcagaatagctgagattgagtttgatgtccttctgtgtatgcatgcgacaacagtggtcattttatctggaactctggatatatttagtcctaaactggcatatgtaggttttagtgtcgctttgcttttttttaaagaaaacattgctgcagtatctcagtttataatttagtatgatggaattcttcactttatct

SEQ ID NO: 29909 - DNA, 652 bp, Glycine max
  Clone ID: TF_LIB4167-022-R1-K1-H1
ggtcgacccacgcgtccgggtggtttgtgttgtggtggcggtgatcgggttcgttattcggcataaatggcaggtttcggaggccaggaaggaggagatcaagaggcttttcattttggccgcggaggaaactgccagggccgagaaagaggcgtcctatgagtacggcacggcggtttctgccgctccgaccaatctatgcgctgtgtgttattttcccgccaccgcgcgctgcgctcagtgcaaatccgttcgctactgttcttttgaatgccaaactgttcattggcgtcaaggtcacaagttagaatgccgtcctcccagcacaactcaccagagtgatggtgcaacgagtgatcttggcagcaaggtagtagagcaaggctattctggaatccatgttgggaagtctgaaagtgaaggcaaagaatgtaaaatagcctctgaaaggcccccaatttttgatatctgcttttctccaaaagtttcatctggaaaggatgcaaatattagagttgagtctcttgcagagggaaatataacagattctaattctgaattgtccagtaactcattttctggattctcagcttgcacgggttctagtgattcatctggaggttcctctgtgtgtgggagcgtgatgtggaat

SEQ ID NO: 29910 - DNA, 1905 bp, Glycine max
  unsure (1)..(1905): unsure at all n locations
  Clone ID: TF_GmC586_1
tttttactttatctctctctctcttcaaagttcaaagttccaagttccaagttccaagtttcaagttccattacacaacacacctattttagttgtagacaaagccacataaatagacccaagaggtttaacttaggcaacgaggagacgcctctcttatcctccacttccagtttcaaccatgtcctgccggaaaagacaaaagacttcgccggacaaaacctccgacgacttcttcgactctctccccgacgaccttgtcctctctatcctctgcaagctcagctccaccgcaacttccccctccgatttcattagtgtcttaataacgtgcaagagactaaactccttaggccttcactctcttgtgttatcaaaagcttcccacaaaacattctcagtcaaagccaaaaactggtgcgactctcttcaccgtttcctcaaacattgtgcagacgccggaaacattgaagcctgttacactctcggcatgattcggttttactgcttgcaaaacagagggagcggcgcgtcgctgatggcgaaggcggcgatgaactctcacgcgccggcgctgtactcgctcgcggtgatacagttcaacggaagcggcggcaccaaaaacgacaaggaccttcgagcgggtgtggcgctttgcgcacgcgctgcgttcctcggtcatatcgacgcgctgcgtgagcttggtcattgcttgcaagacggttacggcgttaagctaaacgtaacggagggacgacggtttttggtgcaagcaaacgctcgtgaactcgccgccgtgctctccgccgggaataccaagcgcccctggctgacctggagccaccaccctgtcacccacccgcggctccggtcgggttgcccgttgatgagtgattacgggtgcaatgttccggcgccggatgctcacccggcgagtcagtttatgtcggagtggtttgatatccggggcgggtttccgggtccggatatgaggctttgttctcattcgggttgcgggcgacccgagacaaggaggcacgagtttcgaaggtgttcggtttgtggtgtggtgaactattgctcacgcgcgtgtcaggcgcttgattggaagtttcggcacaaggcggaatgtgctcccgttgagaggtggctcgatgacgacgacgaagatgtcgccggcgagaatgacggcggagatgacggagtaatgatggttgatagttagaaaactagactatttttacaaacgttaacggtgacggtaagcctgcttggaagtttcgacgggtatgaatctatttttaacatggggtaaaatggggggaaaaatctcatttattaccgtggctttgcaagtgcaacttcaatgacagggttttgcttcgacctcttttccttttacttttactgttgtatagaaccgtaaattaattctcctgaaaaacaaaatgaaggggatattttttattatagagcaactatcatccttaattaattgttaattctggaaaattataatatatgaactttttatgtttgttcttccaatttatttaattactttttatttgcttgattacattcttgcctccctgcagactccgccatccccgtgtcctccaagtgttggtggcttctggctattttttgcggccacccttcttggccccgtcccttccgtggatatttatttctcgcgtgctgggtggagctgcgtccaatcttctgggggggtttttcttatataattgcatacagaaaagaatgtccaggaaagtgttaaccggaaagtaaagagtgttggaatattaataatctcatttggaatcatagagtcacttttctacatataaaatgtattcttatcttaattnnatnnngtcataaataatatttcccccnnna

SEQ ID NO: 29911 - DNA, 535 bp, Glycine max
  Clone ID: TF_GmC24110_3
ggctcgagacaagaagaaagaatctgaacaataatactgatacacacaacactaacactaacaagaagggaggaagaagctgaaaaccctaatctgcagagatgagatgagatgaaaatgaaaaggcgtggaatcagcgcggcaaggaacatcgtagatgcttgtcttgggagtgtgggatctcaaatggctcctccaattcgtattctccgcgttcgtcttggcgattggactgcacgcgctgctcaagaacaccgcctccaagtacttcgagattgaagccactttccacgctatgcctggccctctcaccgaccattctctctgcgccgtttgtcgcaaccccgccaacaagaaatgttcgcgatgcatatccgttcgatactgttcacaagcatgtcagcaggcgcactggaaatccgagcataagatgagatgcaaggagtttcagggcagcgccagtgtgatgaatcttgatcaaactgaagtaactaatcgtgttttcaaagcttctgctgctgtgaatacaagttca

SEQ ID NO: 29912 - DNA, 2813 bp, Glycine max
  Clone ID: TF_GmC5789_1
aaaaggacaccggagggggtttaaatggaatgggtccaggggttatgtaaaggcttggaaccgtttaacagggaaacgagctccaaatattctcacaattctgctgcgagaagacgacagaagggggaaggaagagagattcaggagggagccagagtgagggatacagagaaagaagaaggataaagatttaaaattggaagaggaacaataggaagggaagggagaaaaccctaattaatagataatagaaagagattgcatgatcgatggaaaaaccctagaagaatcatcggagcaggcaggcaagggggcacaatcgacgacgccgtagatgcttgttgcggttggagcgtcgtgggatctgaattggttcctgcaactgttgctctccgtcatcgtcgtggccgttggggttcactatttcgtcaaggccaccgcttccaagtacttcttagtcgacgccaatttcgaaggggaccaccacgccctcgccgccgccgacccaatgcccggcgctctcgccgccgccgttgatcctctctgcgccgtctgtgccacgcccgcccctaagaaatgctcgcgctgcaaagctgtcagatattgttcacaagcatgtcagcagtcgcattggatgtctgggcataagacagtgtgcatgaattttcatgggaccaatgcaagaagctcggctcagaatggggtaattaatcgtgggtttaagacttctgctgctgggggtaaaggctcgtcgtcaattgcactgatacctgactgtggagatggagcaatttccaggccaatcaagcaggctaaagatgttctttttccttacgatggtgaatgagatttcttgtggtgctgttgaatcatcttatgtgcccatttctcaaacagacagtgatttgggggatgtagatatgggcagatcattagaagagacttcaggctgcaaggaagagcaagatgatactgatatggttagttctggtctttgttcgggtccaccaaatgacaattcctttgataagcacccttccgtttcacgtgatcatcaaaacatggaagaagattcagaacatatcgatgtggttaactgcattggtggtacactggctatggaaaacaagaggatgctcacgagttcatgaggttttccattgatacgatgcaatctgtttgccttgatgaatttggtggagaaaaagctgtccctcctaaccttcaggagaccacccttattcaagaaagtggaaatatcagccgacatctagatgcaatttgcacaaaatgtgataagatttcaaatcagtatgaaaatatgatggacttgacagttgaaattcatggagatgctgcctccttggaggaatgtctagaccagtttactgccaaggagcggcttgatggggaaaatatgtataaatgtgaggggtgcaaggattatgtcaaagcatggaaacgccttacggtgaaatgcgctccaaatattcttacaattgccttgaaaagatttcagagtgggaggtttggaaaacttaacaagagagtagccttccctgagactttaaatcttagcccttacatgagtgaagctggagatggatctgatatttataagctatatggtgttgtagtacatattgatatgctaaatgcttcattttttggtcattacatctgttacatcaaggatttccagggaaactggtataggattgatgactggaaggttatgactgtggaggtggaagaggtactttctcagggagcatacatgctcttgtatagcaggtgtagtgcccggacatcaagctttcaaattcaaactagcgaatcttcagggatagcagaagttcagacagaagtggaagtggaaatggaagtggagcccggacaaactgaacaagatgaatgcctctcaaatatgaaggctttgacttgtagtagaggttctgaggttttgccatctgatgctagtccagaattgaaggtttcttccagctatgactgtgagtcttttgctggattgaactcaccagtcaaaagagaacagtttaatgatgtggacatgatggatgttgattcaactggtattgtgaatgagatttcttgtggtgctgttgaatcatcttatgtgcccatttctcaaacagacagtgatttgggggatgtagatatgggcagatcattagaagagacttcaggctgcaaggaagagcaagatgatactgatatggttaggtctggtttttgttcgggtccaccaaatggctcttccttctttgataagcacccttccgtttcacgggatcatcaaaacatggaagaacattcagaacatatagatgtggttaactgcaagttgattacagctaaagataatgcatgctatggtaatggatatgtcagtgcaaacgattcttcaatgccagttgaagacgcaggctcacaattttctggcatcagttcttttcccactgaaaatgacaaaggaaatggaattaagaaagtggaaatatcagctgacatttaggtgcagctatttttgttatttcttcatatcatttaattatcccatcatcgaaaaaggtggtgagttgggaaatttttgtccggggtttcattatttgcaggaccttggatcttatttctaacatttttagatggatatcctattttaattttactgatagaatacaagtcctttgtccttatatcctccctccaatcttgtacatacgagaaacataattcttccaagttgctgtggacctccattgtcgggttggtttaatcattttgactccccc

SEQ ID NO: 29913 - DNA, 1710 bp, Glycine max
  Clone ID: TF_GmC880_1
cggtcgcgtgaacgaacaaagacacggacggtccgcttagagctttctgcggcgccctctatcattgtcgtcgtctcggtttcttcccttctcgtggcagatgaggttggaaggtcagaaaccgaaccgtctaacccacacaaacacaacccagatactataattgactagcacttttttgtttattcctaaatacatggacactgatgccactggagatcctgttgacaagctcaaggctatccagaatgatgatgtagaatatcaagacgaagatgatgattttgatgacgaagaagaagaagaagatgaccctattactcttggtttcgttgacaaacccaagaatgaatggtctcttcgccgtcaatatttcccaagcaaaactggtggagtcccggcttggcttgaccctctgaatataccatcagggagatcatctgtgtgtgacatttgtggagatcctttacaactcttgcttcaggtttatgcaccaactgacaaggaaaccacatttcaccgaatgttgtttgtttttatgtgtccctccatgaaatgtcttcttagggatcagcatgagcaatggaaacgccatccagagaagccatctagaagtgtgaaggttttccgttgtcaactaccccgcattaatccattttactcacctgaatgccctcagtataatgagagccacgaacctgctggcagtggagctgctctttgtgattggtgtggcacctggaaaggagacaagctttgtagtagttgcagacaagcacggtattgctctgagaaacaccaggctatgagttggcgcacagggcataaaactgcttgccaacagatgaaagtttcttcacctgtttttggacccaacaaaagtggaaccacctccttggagtctcataaagttggaagcaagaatctgtggcctgaatttgagatcagcattgaagatgaaagtgaatataatagggacatatctgaggaaaatagcttagctaattccttgatctctaggaacaggaatgatgacacaatgaattcacttatggataactttaagggtgatgatgacaaaaagagctgggcctccttccaggaacgcattgccgaggctcctgaacaagtgttgaggtattataggaatactaatgccaagccaatatggcctgtttcaagtggtcgaccatccaatgctgatatccctaaatgcagttactgcagtggaccaatgtcttgtgaatttcagattttgccacaactgctctattacttcggcgttgacaacgaagtggactctctggattgggcttcaattgtggtgtatgcgtgtgaagcctcttgtgaagcaagtttgccttacaaaaatgaatttgcttgggtacaaatttattcactttccacaaccttatagagaaatgtcttttttttttaatttttttatataaattattatcgtttttaaattttgggctcagaagtatatgttattcttcgtttgacttggtggaagtatgaggaaggattttctttatctacttcaactatcaattttgaggattggctgttgattgtgtaatttataggataggcttgattaggatgtgtacgtttttcactgaaaaaatgataattaattttgctacaatgaacaaggttgtaatcaagtttcaccgtctgaattaaaatagaattaggttgtgagac

SEQ ID NO: 29914 - DNA, 665 bp, Glycine max
  Clone ID: TF_GmC5714_2
cggatgcaacgtccgggcgccggaggtgcaccccgcgagcctgttcatggcggagtggttcgccgcgcggggcggttcgccgggaccggggctgagactctgttctcacgcggggtgcgggaggcccgagacgaggaagcacgagtttcgaaggtgttctgtgtgcggcgtggtgaattattgctcacgcgcgtgccaagcgcttgattggaagttccggcacaaggcggagtgctcccccgtgcaacggtggctcgaggaggacggcgaagatgtcggtaacgacgacggtgacggagaggtggaggttatggtagatagttagacaatttttacaacagtaacggtaacggaagtcgctttggacggaaaaatgaatatttttggcgaagtgaaagaaaaaaaggaattacttgtgatgatttattcgccgtctcaaaaaggtagaaaagagtatatggcttcttttcttttttccttgtataggtcgaaaattctcccgaaaaaaacgagaggagattatttttctttttttattttattttgcaatttcggagtttaaagttaatttagaaattcaatgctaaaactaagaggttactagttactgctataatttttgttattaatttaattgatttgaatttaattaatagttttaaaaa

SEQ ID NO: 29915 - DNA, 973 bp, Glycine max
  Clone ID: TF_GmC24110_1
cggtccggattccccggtcgacccagcgtccgcaagatacagtgaaatgctccaatccaaccttatttgcatcaaaaaaaagaaaaagaaaccgcttctccttaatccctcccacttgttctgtttcagaattagaaaactaaagaacaagaagagaacaacggaaactaaacgtagtacacatcactaactctaacaagaaggaaggaaggaaggcaggagaatcagaaagccctaatcgattttcggttattatggagagatgaaaatgaaaaggcgtgggatcagcgcggaaaggataatcgtattcgtagatgcttctctcgggaggagtgtccgatctcaaatggatcctccaattcgtattctacgcgttcgtcttggcgattggactgcacgcgcttctcaagaacaccgcctccaagtacttcgaccttgacgccactttccacgctcacgctattcctggccttctcatggaccattctctctgcgccgtttgtcgcaaccccgccaacaagaagtgttcgcgatgcaaatccgttcgatactgttcacaagcatgccagcagatgcactggaaatccgagcataaggtgagatgcaaggagtttcagggcagcagcaccagtgtgatgatgaatttggctcaaactgaagtcactaatcgagttttcaaggcttcttctgctgctgtgaataggagtacatgtacttcttcaattgccctcattcctgaatgcggtcgtggaacatccaggactatcaagcagcctaaaagtgttctctttccttatgacgaatttgtcaaattgtttaactgggacaaaccaggatttcctccttgtgactcttaaattgtggaaacagctgctttgcgaatgtggttctccaatgtctctcattcacaaggccacttattgcctttctattggagaagggtcaccacagagaatgctgccataatgattgg

SEQ ID NO: 29916 - DNA, 714 bp, Glycine max
  Clone ID: TF_uC-gmflLIB3275P157c04b1
cccacgcgtccgataattttactcaacgaataattgcttgtgcttcgagaaagggaaaatgaaaaagcaagattgaaagagcaggcaaaacaaaacagaaaaccgcagagcacgtcactcacaacgacataaaaaggccaagaaaaaattgagaattagaaaactaaagaacaagaagagaacaacggaaactaaacgtagtacacatcactaactctaacaagaaggaaggaaggaaggaaggaagaatcagaaagccctaatcgattttcggttattatggagagatgaaaatgaaaaggcgtgggatcagcgcggaaaggataatcgtattcgtagatgcttctctcgggaggagtgtccgatctcaaatggatcctccaattcgtattctacgcgttcgtcttggcgattggactgcacgcgcttctcaagaacaccgcctccaagtacttcgaccttgacgccactttccacgctcacgctattcctggccttctcatggaccattctctctgcgccgtttgtcgcaaccccgccaacaagaagtgttcgcgatgcaaatccgttcgatactgttcacaagcatgccagcagatgcactggaaatccgagcataaggtgagatgcaaggagtttcagggcagcagcaccagtgtgatgatgaaattggctcaaactgaagtcactaatcgagttttcaaagcttcttct

SEQ ID NO: 29917 - DNA, 564 bp, Glycine max
  Clone ID: TF_GmC154380_1
atcgcaaattatcactctcaaccctcccagaaaagggtcgttctctcttggccactggggtgctctgtcctcggctcagtcgcagattctctccctcttccccccctggcccgcgccgttctcgcttgcccgcttgggttggcgttccaggggaagtgattataagccaagagccttacgtttgtgttccaaacaactcctcggtctccccccagaaaaggtgcgatggatgtttcactacaattaataacaacgtccttagcaggtgctcgcgttgccaacttgcattctattgtggaaccgcatgtcagaggtcagagtggaagctgcatcgtcttgagtgtgaggtcctctccagcctccacaaatacaagagaaaatctctcacaccatccatacgcctgatgctcagactttatcttcggaggaagttgcaaaatgataagatcatcccaagcactgcaatggacaactacaacttggtggaggcattagtggctcacatgtctgacatcacagaggagcagctggtgctttatgcacagatggctaatcttgtaaact

SEQ ID NO: 29918 - DNA, 484 bp, Glycine max
  Clone ID: TF_LIB3242-450-P1-J1-B9
gatttgcaaagtggtctgcagaatcgcaaattatcactctcaaccctcccagaaaagggtcgttctctcttggccactagggatttctatccaggggaagtgattataagccaagagccttacgtttgtgttccaaacaactcctcggtctccccccagaaaaggtgcgatggatgtttcactacaattaataacaacgtccttagcaggtgctcgcgttgccaacttgcattctattgtggaaccgcatgtcagaggtcagagtggaagctgcatcgtcttgagtgtgaggtcctctccagcctccacaaatacaagagaaaatctctcacaccatccatacgcctgatgctcagactttatcttcggaggaagttgcaaaatgataagatcatcccaagcactgcaatggacaactacaacttggtggaggcattagtggctcacatgtctgacatcacagaggagcagctggtgctttatg

SEQ ID NO: 29919 - DNA, 483 bp, Glycine max
  Clone ID: TF_GmC142923_1
gaatgcttgccatgttaagcattggaggatttgccataaatatgaatgcgttgagaaagaagggtcacaagatcagcaggaatcaccgtttcatggaacccattgccttatcatggagcctgaaaatggtaagttctcattcagtgaagttattgagcagagatcatataagggagatgtttactatgtcgaaggaggagaaaacagtgctgaggtcagtgatgaaacagctctaaagtgtaacgatggctgtgcagtgtgtggcaatccaagctctaaagtatgctcaaggtgcaaagccataaaatattgctcacaaacatgccaacatttcgattggagatctgggcataagtttcaatgtcttgttgagaaggcaaatacaactgaaaaagcaattgtcaatcaaggaagacctgcaaacggaaatgttgtaaatctcacgaattcggatgaggtagaagataatgctcattcatctag

SEQ ID NO: 29920 - DNA, 376 bp, Glycine max
  Clone ID: TF_GmC95076_1
aagctgcaagcacaaaaggcactaagcgagaatacccgagcttgtcacacctgccagaaggaatcagacacactcctaaaatgcacacgatgcggcattagttggtactgcaataaggcttgtcaagagattggttggaaagataagggtcataaggacgaatgtcggttgctgaagaacgaaactctgaagcaaatccttctctttgactggaaacactttaaggacttcgtgcaattcccactttctgcttgagggctgctcacgggtgaaggaggttcaaagggttgttagaagcggagcttcttgtatttttttcaacattatgaagctttgtcatggactatcagattaggtatagttgatttatccgccg

SEQ ID NO: 29921 - DNA, 645 bp, Glycine max
  Clone ID: TF_GmC5789_3
ccacgcgtccgcagagattcaggaggagccagagtgagtgatacagagaaagaagaaagatttaaaattggaagaggaacaattggaaggagaaaaccctaattggaggatgtgatttattgcataatcgatggaaaaaccctagattcggagcagggggcgcaatcgacgacgccgtagatgcttgttgcggttggagcgtcgtgggatctgaattggttcctgcaattgttgctctccgtcatcgtcgtggccattggggttcactacttcgtcaaggtcaccgcttccaaatacttcttggtcgacgccaatttcgaaggggaccaccaccacgccctcgccaccgacgccatgcccggtgccctcgctgccgccgatcctctctgtgccgtctgcgccacgccagcccctaagaagtgctcgcgctgcaaagccgctagatattgttcgcaagcatgtcagcagtctcactggatgtctgggcataagacagtgtgcaaggattttcgtgagaccagtgcaagaagctcggctcataatggggtaattaatcgtggatttaaggctactgctgctgcgggtaaaagcttattaacgatggccctgatacctggctgtggagcaggagcaatttccaggcca

SEQ ID NO: 29922 - DNA, 798 bp, Glycine max
  Clone ID: TF_GmC441330_1
cgcaagtccaaacacagtttcaattccaccatctttcttcttctattcctcttttcgttttttcgtttataaattctaaaattccaaacacagttattcacacatgacatttcaccaatctctcactctgcgtcttcgagctacatatgcctcatcctctctcactctgcgtgttcttcctcgctaatctcaccggcaactacgtcaccgcccaatcgaaaagagactctttccgcgatcgcactctccgttgttactttccacgcgcccccgcggcgcgtcgcgttgccttcgctggataaatgcgtgtcaccatcgatctagggttctggagcctggtcgtcgtcgcggtggtcggcctcatcgtgccggtgatcgccttcgtcgtccagcgccagtgccagcgggcggctgccagggcagaggagattaagaggctcctcgttctcgctgaggaggagtccgtgagggccgagtcagagtcggaggcttcggtctaccagcaaaacagcatcgtttcagcaccgccgaagaacaaagtatgcgcagtgtgttactctcccaccaccacgcgctgcgccaggtgcaaagcggttcattactgttctggaaagtgccaaattgttcattggcgccaaggtcacaaagataaatgtcatcctcccagtccaacttgccagactgaggatctggtaagtgatcttggaaagaaggtagcagaaccagactatcgtggaatccatgatgagaagtctcagactaaaagcacagagtatgcaacatcatctgagaaacccc

SEQ ID NO: 29923 - DNA, 331 bp, Glycine max
  Clone ID: TF_LIB3049-052-Q1-E1-H7
ggggccgtgcagcacataatagcgtgtggtggtcggagagaagaacgggatggagtgcgcggcgaaggggagcggaggaaggtgcggcggcagcggcagcggcggtgccacaagactctgcgctcgctgcgaagccgttgcatattgctctctctctcaccagattgcacactggagtcgtcacaaacacgagtgcgataggttgcaacagcaggtgaagagtgtcgaagtcctcaataattttcccttcactttctctcgcgaatccacgtttcaggtttgtgtgaagcaggaaactaggtgttcattttttagcaagagaggccttcat

SEQ ID NO: 29924 - DNA, 3855 bp, Glycine max
  Clone ID: TF_GmC5843_1
cggctcgagcggctcgagcggctcgagcggctcgagctattctccaaataacacacagcgcaactttcgtcttctatccccaaccctaaccagttagcgaacgatcgattagagtttcgacgcaggatgagttcgaaagagcgaagccagcagccgcattcgagggttcctcgtcgtcaggagtggattcgtagagatgttggtggttgctccaatccaagaaagcccaagaagggatcatcttcgaattcgagggaggagtctaatttgcctcagctgctgcaagagattcaggacaagctcgtcaaaggagctgtcgaatgcatgatttgttatgacatggtgcgcaggtctgcgcctatctggtcttgctccggttgcttctctatctttcacctcacttgtatcaagaagtgggctcgtgcacccatttctgtggatttgtccgttgagaagaaccagggcggcttcaattggcgttgccctggttgccagtctgtgcagctcacttcatccaaggatattaggtatctatgcttctgtggaaagaggccagatccaccctctgatttgtatctcatgccacattcctgtggagaaccatgtggcaagcctcttgagagggaccttcaaggggataaggagcttctttgccctcatctttgtgtcttgcaatgccatcccggcccctgtcctccttgcaaagcatttgcccctccacgtctgtgtccttgtgggaagaaaaatattaccactcgttgctctgaccgccagtctgttcttacctgtggccagcgctgccaaaagcttcttcaatgtggccgtcatcgctgtcagcaaatctgtcatctgggtccttgtcatccttgtcaagttccaatcaatgcctcttgcttttgtgcccaaaagatggaggtaattctttgtggggagatggctgtcaagggtgaaatcagagcagatggtggagtattctcttgtggttccacttgtcaaaagaaacttaattgtggtaatcatatctgtatcgagacttgtcatccaggtagctgtggggactgtgaattattaccatcccgtattaagacatgctgttgtgggaaaactagattggaggagaaacgccacagttgtttagacccaattcctacctgttcacaagtatgtggcaagtaccttccttgcgggattcatcattgtgaagagccatgccatgctggggattgttctccttgtctggttctagtttctcagaagtgtagatgtggctcgacttcccgaactgtggagtgttgcaagacaaaaatggaaaatgagaaatttacttgtgaaaggccttgtgggcagaaaaagaattgtggaaggcatcgatgtagtgaaaggtgttgtccactttctaatccaaataatattctaaatgcagattgggatccacacttctgtcaattgccgtgtggaaagaagttaaggtgtgggcagcatgcatgtgaatccctgtgccacagtggtcattgtccaccttgtcttgaaactatatttactgatttgacatgtgcttgtggtaagacttcaatccctcctccattgccttgtggcacaccgcctccctcatgtcagcttccatgttcagttcctcagccttgttggcatccagcctctcacagctgtcattttggagattgccctccttgttcaatgcccatagcaaaagaatgtattggtggacatgtagttcttaggaacataccttgtggttcgaaggatattaaatgcaataaactctgtgggaagaccagacagtgtggtttacatgcatgtggcagaacatgtcacctccccccttgtgataatctgtcagctgtgccaggtatccgagcctcttgtgggcaaacatgtggtgctcctaggagagactgccggcatacatgtacagctccttgtcacccttcaactccatgtccagatacaagatgcaaattccctgtcacaattacttgttcttgtggccgaataacagaaaatgttccttgtgatgctggtggcagttgtgctaattatgatgctgatactgtacatgaagcttccattattcaaaagttgcctgtgcttcttcaacccgtggctgcaaatggcaaaaaagtccccctcggacaaagaaaactgatgtgtaatgatgactgtgctaagttagagcggaaaagggttcttgcagatgcttttgagattaccgctccaaatctggattcactccattttggtgagaattcggttgcttctgaattgctggctgacatgttgagacgtgattctaaatgggttttatctgttgaagagagatgcaagtttttagtacttggcaagagcagaggaaatgcacatggtccaaaagtccatgttttctgtcctatgttaaaggacaaaagagatgcagtgagggtgattgctgagagatggaagcttgcagtgaatgcagctggtcgggagccaaagcatttcgtagttgttcatgttaccccaaaatcaagagctcctgctcgtgtgctagggtttaagggtactacaactgtaaatgtaccccttcctccggcatttgatcctttggttgatatggatcctcgacttgttgtctcttttatagacttaccaatggatgcagatattagtgcattggtgttgagatttggtggtgagtgtgaacttgtttggttaaatgacaaaaatgcattggccgtttttaatgaccctgcccgtgctgcaactgcaatgaggaggttggatcatggtacggtttatcagggagctgtggtggtggttgttccaaatgtcggggcatcagtagcatcttcagctaccaatgcctggggaggatctgggacaatgaaaggaggagcactggcagcattaaagagtaatccatggaaaaaggatgttattcaagagccaggttggagagaagatgcttggggtgatgaggagtgggctactggttctgctaatgtcaaattgcctattcagaagaaagaagcccgaatatctgcttcagtaaatccttggagtgtcctaaatcaagaatcgtcttcaagttcatctgttgcagccattaaaattgatggttctaggaaacactctgaaagtagtgttatcacaaagttggagcctcgtgatggtggttcaaatctaggagggcagcctgcaggaaactttgatgctttggaagcttctgatgtagtagatgattgggagaaggcttgtgaatagcaaggagtaaacatttttcattttattttgttgagaaggaggcagattttgactagtgaaatgtctaaggctctttttgtccactagatgtatctcttttcatgttttatccccctgattttaatcaatttcgatgttattctaactagttggtgccactgttgagataatatctgacattctaccctagcttttgagactgatagaagaagggatgtgaatgtttaccacaaataggtatgttaaaactcattttataacctttatgcttatattgtactcaaattttggtttgctgtaagctctgccctcaatttgggtacacatctcaattacaaaacagttcaaagttaattttatcacaatcaattctactcaactttaatacacgggcactaaatatttataagtattaaatattattggacttggtttatcaaaacctggaggggatgggatgttgtatatgatattataagttggtggcttggctggcttccatgaaaatagattacttgaaatgtggaatggagcatatgagaaagaccaatagtttgtctcactgcaaaaggatgtcaattttgaatctctggaagc

SEQ ID NO: 29925 - DNA, 2482 bp, Glycine max
  unsure (1)..(2482): unsure at all n locations
  Clone ID: TF_GmC701_1
ccacgcgtccgtccacctcttctgcatccagagctgggctcgccaagcctccgaccttgccgccgcccgcgccgccacgcgccttcctatttcccccgccactgcctccgcctccgccctctggaactgccccaaatgcagatccgaataccccaaatctcacattcccaaaacctatttctgcttctgcggcaaaatagagaaccctcctaacgatccatggattttacctcactcttgcggcgaggtttgtggaagaccgttgaagcacagttgcggccaccattgtttgctactctgccaccccgggccgtgcccctcttgccccaaactagttaaagttcgatgcttttgcgggtgccttgaagatgttcggcgatgtggcttcaaggaattttcgtgtaacaaaccctgttccaagtttttagattgtggggttcaccgttgcattgagctttgccaccctggcgcttgccctccttgccggacacgtggagtgcacgcgtgccagtgtgcgaaggttaaagaggagagggagtgctgtgatcgtgttttccagtgtgggaatccgtgtgagaagaggcttggctgtgggaagcatgtttgtgagagagggtgccattctggtaagtgtggtgagtgtccccttaaggggaagagaacgtgcccttgtgggaaaagggtttatgaaggaatgccttgtgatgctcctgtgcagctatgtggagctacctgtgataagatgttgccatgtggctaccacaggtgccctgagcggtgccaccgtggacagtgcgttgagacttgcagggttgttgtgaagaagtcatgtcgttgtggcagcctcaagaaagatgttccttgctatcaagatttggcgtgcgaaaggaagtgtcagaggatgcgtgactgcggtcggcatgcttgtaagcggcgctgctgtgatggcgattgccctccctgctctgagatatgcggcaggaagcttcgatgtaagaaccataaatgcccttctccatgccatagagggccttgtgctccttgcccaataatggtgacaatttcatgtgcatgtggagagacacgttttgaggttccttgtggtaccgaaatggacaataagccacctagatgtcctaaaccatgtcctatcactcctttatgtcggcatgcatcaaatatcaagccacataaatgccattatggagcctgccatccttgtcggctaccttgtgccaaagagtaccaatgtggtcatacatgcaaattaaggtgtcatggtgctaagcctcctcctaatccagagtttactcttaaaccaaagaaaaagaagattatacaacaaagtgaaagtgttcctggcactccatgccctccgtgcccagaacttgtgtggagatcatgtgttgggaaacacattggagctgagagaatgatggtctgctctgataaatcacagttctcctgtgaaaatttatgtggtaatcctctaccatgtggtaatcattattgtacaaaaacctgccatgccttggagaaccagttacaaggaagccaaccttgtgaagattgttatctttcttgccaaaagagagcctgcatgtccacatcactgccctcggcgatgccatcctggagactgtcctccatgcaaggtgctcattaaacggtcatgtcactgtggtgcaatggtccatgtgtttgagtgcctatattacaacggcttgtctgcaaagggtcaagagactgtccgctcatgtggtgggccatgtcacagaaagttgccaaattgtacacatttatgcccagagacatgtcattctggtcaatgcacaaatgctgagaaatgctgtaaaaaggtcactgttcgatgcaaatgccatacattgaaaaaggagtgggtttgtcaagatgttcaagcagcatatcatcttgctggttgccatcctagggatattccaaaaaatcaatttggaattggactcattccttgcaattctgattgtaacagtaaagtgcaggttgttgagtcagaactacaattgcgtaaaactagagttacagaggtacaagagccagatgtagaaaaatcagttcggaagcggcgaaaaaggcgggaacaagttctagaatccaaggaaacttcaaaactacagaaaattatttcaagaatgaagcggcttcttctatttgtctttattttggtcatacttcttgctgctacatattatgggtacaagggacttttatggctcaatgattggatgaatgaagtggatgaacgaagacaaagatattctagaatcaaatgattatttatcagtttgattgccccctttatccaccatttttttcattagtctgattacatttttttaaggactgattacattatttttcttccctttcaatgaggatatataatgcgttaaattcaaaaaaaaaaaaaaannnnncggcgantagtagctgtgaccgggaa

SEQ ID NO: 29926 - DNA, 1304 bp, Glycine max
  Clone ID: TF_GmC701_2
ccacgcgtccggaagaagtcatgtcgttgtggcagcctcaagaaagatatttggcgtgcgaaaggaagtgtcagaggatgcgtgactgcggtcggcatgcttgtaagcggcgctgctgtgatggcgattgccctccctgctctgagatatgcggcaggaagcttcgatgtaagaaccataaatgcccttctccatgccatagagggccttgtgctccttgcccaataatggtgacaatttcatgtgcatgtggagagacacgttttgaggttccttgtggtaccgaaatggacaataagccacctagatgtcctaaaccatgtcctatcactcctttatgtcggcatgcatcaaatatcaagccacataaatgccattatggagcctgccatccttgtcggctaccttgtgccaaagagtaccaatgtggtcatacatgcaaattaaggtgtcatggtgctaagcctcctcctaatccagagtttactcttaaaccaaagaaaaagaagattatacaacaaagtgaaagtattcctggcactccatgccctccgtgcccagaacttgtgtggagatcatgtgttgggaaacacattggagctgagagaatgatggtctgctctgataatcacagttctcctgtgaaatttatgtggtaatcctctaccatgtgggtatcgttattgaaaaagtaaacctgccatacatatctaattgtgattggatgacgctttatggtgtcagatgctaaactattaactcctaaattatattgtttttcaatgttttcattaaattgaagaggtatgcttttattagtcagctctgcagtggtagtgtctactctagtaattattgaaggtacaagagccagatgtagaaaaatcagttcggaagcggcgaaaaaggcgggaacaagttctagaatccaaggaaacttcaaaactacaggtaatgttagttttcttaataaaagagctatatctatgttccaattgcctttttcttcgctgaccacttgtgaatgtaaacgttgaacagaaaattatttcaagaatgaagcggcttcttctatttgtctttattttggtcatacttcttgctgctacatattatgggtacaagggacttttatggctcaatgattggatgaatgaagtggatgaacgaagacaaagatattctagaatcaaatgattatttatcagtttgattgccccctttatccaccatttttttcattagtctgattacatttttttaagggctgattacattatttacaaatcccaaaaatgaggata

SEQ ID NO: 29927 - DNA, 487 bp, Glycine max
  unsure (1)..(487): unsure at all n locations
  Clone ID: TF_LIB3242-265-Q1-J1-F11
gctccgagccgacacggcacttttgggggatccaatttaggaaaggcagaaagacaaagagccgattaagatcgcagctatcttaagcctatctttgattgcctaataccttccaattgtagctgaagttatccgactacttcattcttgcacatgagagggattgcaggtttccacatcgcattcattactgtgattctcaagctaccgggaagagccatcgagaatggaatctgatgagcctgctgatccgaaacaaccggtgacacctcgagcttgcttgcaatgccggaaggtgaagatgaagtgcctcaaggccacacaaggcactaaatgcgctaggtgttcgcggaagtctctgcaatgtgatttccttgaacatcggcgcggcaggaagaaaggcttcaagttaaacagaacagcgtcgaaagctggactgtctactcagatctatccgagttctggcagnctccaaatgctggcaatg

SEQ ID NO: 29928 - DNA, 540 bp, Glycine max
  unsure (1)..(540): unsure at all n locations
  Clone ID: TF_jC-gmst024100g08a1
actcgctctcgcgtattcaggcgatggtagttggataagcccgtcgtatatgggtgtgatgtatctnttaggcatgataggagtcggttgctgaaagcagcgcattatgcttctccaatgaatccaggctccagagaccgttcgtggactgggttctccgagtgtctgtcaaagagaggattaaacaagttactctcctctttggacagcggcggagattcgtcttgatcttcgctatctgtggtgactcgctcgtttcccaatgccgggctccgggcagcgagggctcgcaaacgcctgttctcttcttcgagtttattgagataactggcggcttgtcaaccttgatcacgctggttcttctctctgctgacctttcatctactcgaatctttcgctctttggcagggaactgacattcctcagcccgaccgctagataaacatccgtcacacggccgtttgccggagcatttggtcttttgggaatggcatctatgacaactacataactgtattagaatattatcacgcatgtggt

SEQ ID NO: 29929 - DNA, 456 bp, Glycine max
  Clone ID: TF_jC-gmst024100c06a1
tagttgttctgcctagcacgaagggcgccggtgccaccatggccacgttctcccgtatctgcgccagtgcgaacgaatcgtaggcagaggttaaggctatcgaggcatgcagcactgctggctccgacactgacagctggaggacgagtgagctccagaaatgggacccgaatggtcgagtgagtttgtccgtcagcaggacacggaagcggtccaggcagcgcctctcctcctcagcgaggccaggaagagtccgcaggggatagaccggggagggaagtagtctcgttgacttgggctggccccagatgccatagccgtcacaggccctgccggtatccagacaccgacgacatgacggcctttgatcatcgcatttaacccgccgaaccttgcatgttcgacagcccgacctagttcggggcgtgctcttgcgcttcgccataatggcctcta

SEQ ID NO: 29930 - DNA, 372 bp, Glycine max
  unsure (1)..(372): unsure at all n locations
  Clone ID: TF_LIB3139-105-P1-N1-G5
gtcttgttcttatctttcaaagtatggttggggttcccggaaaatcaaaagcgtgcatcaattgtcgcaagcgtcgatcgcagtgtgatatgaaacgaccctcgtgtggccaatgccaaagatctggtattacatgctccggctatcagaaagagttcatcttcctgaacagcactacgcaagaagcccangacggctccttgtcgctcgagaaggagagctactcagcgggaactagaacaaggaacccaacaactgcgggttccgccgcatcgagggcagccgctacccgtacaactncggtcgttctccacgcaactcttgagcgcagtgcctacgaaaataatgtcattgatgaatttgggcatcata

SEQ ID NO: 29931 - DNA, 516 bp, Glycine max
  Clone ID: TF_jC-gmst024100a04a1
acgacaccttcttcaccaccggtcaatatttttttccgttctcgtagttctgcagcccttttctcgagccgttcacagtatgcctccagagatccaacatagcttctttcttttcctcggggaaattcatcgctgctggagcaggtatccgcttttcctgctctttcgcaagccgaacaagccgggagtttcccgtcgcatctgatcttggcggttcggcatcttgagcatgcggcgactggccgactgactttgagcagcggtctgtccaaaaacgaggaattggacattctaactgtacatgttccctatcgagttcatatcagtgtggagctagcatgatgactcggcagtgtttcacgaaatagtcttcagatacaggctgagtttcatgtgaactcagtccgtgaaagctaggaatcaatttcctcgttaacagtctctaacgctaggaagatttttatgttgactgattaaaagtaagagttactcaccacttcaactgtgtgcttcact

SEQ ID NO: 29932 - DNA, 1477 bp, Glycine max
  Clone ID: TF_GmC991_1
aggagatgagcgagcgtgatgtgccggtgtccgattctggtagtggagttcctaaaagaggggttagtgaattaatggaggttcgaggagattcggacacttcaattttgtctttctctgagtttttagttatgtttgacgatccagattgggaggttggcatcatgcctggactggtgaagcttgaaaccggggattcaaacaggcatggtgacacggtatgctcggttttgtggtacccctccggatagtctcaatttaaggagatatgatgcacttttagtttgtgtaaccaatgctaaaggtgctaatattaggaaatttgatgtcactgtatacatcaaggttttaagggctgtggatctgcccggccagccggttagtgaattaatggaggttcgtggagattcggacacttcaatggtgtctttctctgagtttttagttatgtttgacgatccagattggggttttggcatcatgcctactctggtgaagcttgaaactggggatagaaataggcatggcgacgtggtgtgctctgtttgccgctacccaattattggttctcggtttaaggagataaaatctcattttagtttgtgtaaccaatgctacagtgagggaaaagtgccttcttcatttaagcaggaagagtacagatttaaagagtatggaagtgagggtgaagccatgaaagataagtgtatgtgcttcaacttgcaatcccgtaatgaaaagtagatagcggcattcaattttttgtctttagatttttttgttctactatcttgtattatcccatcttgtttatcctagcttttcaggtgtgaatgtgattataactagagctcatgagttcagcaggcattttggccccttgtttaataattgtttcaggtggtgcttcactgctctttagtaactgtttatagacattgtaaaacctttaacctccgtgacaaacatttgtgtttatcatgcttctttttatcccttctttctgatttgtatgaagcatttatcttttgacacatgaagcctgaaaagtaagtctagagtactgtgattctaactttcaattatatttgtagtattcaacggaggagtggtcaatttttcccccttgttacgttagattttgtttatacgctttaagtaccatgagtacaatacattcaatggtttatatttcacctcaattttaatctgtcagtacatttaactctgctttgaactttcatttgtttccatatggttaatttgatgtgatgcaatgagagtatacaagaattttgaacagtagggactttgcggttttgtatttatatattcacgaatttttccatctcttcatccatctcttcatcaacagtacaatcagtggcggttctaccatgcggccagcaggggcatatgcccgggctcagctaggcattttttttggttacaagcccaatatttttttattagtctt

SEQ ID NO: 29933 - DNA, 417 bp, Glycine max
  Clone ID: TF_LIB3030-004-Q1-B1-E8
aaccactctctcataaaatcaaagactcatacatacaataaatacacaagtaattaacacagccatgaaatacaatgagatatcccatttcagccacactgaacacaagctgagattcgagtactcagaattccccttcaaatgtgatggctgcaaggaagtaggcatagggtcacgttacaaatgctccatctgtgacttcgaccttcacatgcactgtgccatgataacctccccgaccttgcaccaccctttctacaccaaatgcaacttccagttcatgtcaaagccaccgggagacacgcctcgttactgcaacgcgtgcgagaaggacgtgagtggcttcttgtaccactgcaaagcgtgcggcttcgacctccaaccgtgttgcgccaagctaccgttgctccttgatga

SEQ ID NO: 29934 - DNA, 2979 bp, Glycine max
  Clone ID: TF_GmC14821_1
cacccatcagcgtccggcgtccgctttcagcttgtccatctatccccaaattctgttccgaagaagaagcctcgtctcggataagggttagggtttctgtgttttctctttcttccgtgtaacttctacgtttcccttcgtcgctccaagagctatggactctgctctagtgatcaaggtgaaatatggagataccctcaggcgcttcagtgctcgtgttgatgagaataatcggctggaacttgacatggttgacttgagggcaaagatatgttctatcttcagtttcagtgctgatgcaaatttaattctgagatatgttgatgaagatggtgacttggtgactctagttgatgatgatgaattgcgtgatgtgatgaggcagcaattgaagttcttgaaaattgatgtacacatgaacaatgacagtgggggtaaatcaaatgctgggtctagtggaagtgccacccccatagaatcttgtcctgcctcaagcccatttctgtttagaaatgctatgctacgtgaacatctttctaaaaaagcagcatcttcaagtcctgtggttgataatcttgctgattcaattttgaaaatgggactaatttcccatttcgagcctcctgatacagctggtaaaagctcaaaaactggtgttcctgaagaacctatcactaaagcaatgggtccacaatcttcacatgtggactcagcctccaatgctagtgtcaatagtgatagtgctacccccataagatctccaattccaaacccttatctaagtggaaatgctgttaaagttgacgtctcatgttctgtgcccgaaccagtacgccagttttttttccaaatcatcaagttcaaatgctgctgcgtcttcaagtcagctgcctgcaaatctcgctgatttaatttccctagtgcctgaaccagtacgcgagtttctttccaatttatcacattcaaatgctgcatcttcaaatcagctgcctgttaatctcactgatttagtttccctactgggacaatctattctaaattctcattgccagcctcatgttgcaactggtccattcacaaaaaatggtgttcctgaagaacctatcacttctgaagcaagaggtcaacagatcccatctgcagactcggctttcaatgccactcaacaagtggaggcaggagttgcccctgttgatctcaatgtccctccttttgatccttttttagctcagttcttccctgatggtgatggcaagaagggtgaaatgccggctgtcgatagttctgctggtaaggatgacagtagtgggatatgctcaagttttgctggtcctaataacattcaacccagactacatcattgacttctggtgctttcattgaatgcccatttgctgggacatatattaattcttggacaccacttcctggaaactctcaaatgcccccatttaaaaggagccatagtcacactgatgcaatgtctggtatgttccataagggggtccgctgtgatggctgtggtgtctatccaataactggacctcgtttcaaatccaaagtaaaggaaaattatgatctttgcaacatttgtttcaatgaaatgggtaatgggacagattatatcagaatggaccgccctgcatctgctcgggcccctcgatacttacatggacatacaaaaaactttccaacattaccaccacatatttttaagaaaggtgccattttgaagcatgcaaagccaaaactagatagtaggtttattttggatgttaatgtgatagatggtacaatgatggctccatctactgcatttacaaagatctggcggatgcgcaataatggcactatagtctggcacaagggaactcaacttgtttggattggaggagacaagtttagtgactctcattcagttgacttagaggttcctgaggatggtgtccctttggagaaggaacttgacattgccgttgacttcacagcacctccattacctggtcgatacatatcatattggaggatgacaactccatctggacataaatttggccaacgtgtttgggtccttatacaggttgatgcatctctccaggactcattttatgatacctctcaaggtctgaacttgaatattccccttgatatcagtggctctaaaggacctcagattatagatatcaatgtccagcctactgaggaagatactgttcttcaaacccgcaatcctaatgctcccattgagcctgtgaatcaaatggttgataatgaaccaaggtttgagctggaaaatgaattccctataaatgaagctacatttgttggccctgctgcctcagcccctgctgcaacccctgtggcatcttcatcagtttcttatcctattattgatttatctgaaacaaccccagctgttccatctaatcagcaatcctcaactgtggatgtgccttcatcatctatggggactggtggaattaattctgtggaggagagtctacttaaagagcttgaggagatgggttttaaacaggttgatttgaacaaggagatcttgaggaataatgagtacgatctgtaccaatccctagactttctctgtggtgtttctgagtggtagtgggaccatccatttgcttgcagagttacgggagatgggttcccgtgacagagatgaataagaggctgcttgagaaaaacaatggaagcctcaaacgtgttgttatggatttaatcaacggcgagcagtattttagttgaaatgttagttaatagtagtttatgtaaaggtggcgacttgggcttctttacagtttaagccttgttattttgatttatatatcttatttcctatctcgatcttgagttgtggtgattcatcacaattgaacaatttgatctatcctatgtttggatttaagtatgttatgaactcaaaagtatatagcttaaaaaaaaaaaaaaaaaaaaaaaaaa

SEQ ID NO: 29935 - DNA, 472 bp, Glycine max
  Clone ID: TF_GmC90028_1
aacaagttctggtcactaacatcatcagctgtgaactgaaattcatttccatctcccactgagtccacttctatcggaattgctgtcataggatgatctctagagtgtggtggaggaagacgatctgcatctggtacttcatagcaagcctcacacaagtcaaaatcaggacaaacagtacaatgccatctccgcctttgtataggtactgtagagcaaccatcacaacaatattggacagatgaagtaatagtatcgtcctcaatcatgatttggttatttccagtacttgggtcagcagggccaggaactgacaccacactctcaacagcatcatctgtagccaacatggtttgctttggaaaagggacctgaagcaatcttgaagatatggccaaactggggaggaaatgtgtgaaaacgtgaatatcaaattcagagccaaaaaaaaaaagtaagctaaaatacctgc

SEQ ID NO: 29936 - DNA, 1142 bp, Glycine max
  Clone ID: TF_GmC4344_2
atacattctttgacactagacaggcatttctgagtctctgccagggaaatcattaccagtatgatacactaaggcgggccaagcattcctcaatgatggttctctatcatcttcataatccaacggctccagcatttgtgacaacttgcaatatatgctatcttgacatagaaactggtcaaggttggcgttgtgaggtttgccctgagtatgatgtatgcaatgcttgttatcaaaaggatggaggtattgatcatcctcataagttgacaaatcatccatccatggtggaccgtgatgctcagaacacagaagcaagggaggttcgagtagtgcagctacggaaaatgcttgatctccttgttcatgcatcccaatgtcgttctgcacattgccaatatcccaattgtcgcaaggtgaaggggcttttccgccatggcatgcactgcaaaacacgggcttctggaggttgtgttctttgcaagaaaatgtggtatttacttcaacaacatgctcgtgcttgcaaagaatctgaatgccacgtaccacgttgcagagatttaaaggaacatctaaggaggctgcagcaacagtctgattcacggcgtagagctgctgtgatggaaatgatgaggcagagagccgcagaagttgctaacaatgctggatgagcaatttatacttgtaaatatgtggcactttgaagaaatgctctagacagaggtataccttagtttcacctatgctccgacagcagtgattgtttttgtgaatggaatacgtagggtacatgtagccttgcgtccatctcgacatctttgtcccagaaaaagatctgagttcagccatttagtgctgctgtcctcttctgcaaaggactaacaaggtccggcggggatatttggtggttcgtctgtttttgtaattctttgattttgttaagttacttgttttatgtcagatgccattcttcggtggcgggtgtactatagtcctaaataggtcacaaatttcttacaaatctgtgggagtgagggagggagggatgtcatcaagtcgtttttagttgaccgttttaaagattcaatgcattttgtagaatcttttatttaaagatgaaagtaaataattagaatatgcgc

SEQ ID NO: 29937 - protein, 103 aa, Glycine max
  Clone ID: TF_11274280.pep
ADSSREENVFMAKLAEHADRYEEMVEFMEKVAKTVEVEELTVEDRNLLYAAYKNAIAARRALPTTTSSIDRKEETPCAEDHLAMVEEPSGTLAAYIPAICRVR

SEQ ID NO: 29938 - protein, 54 aa, Glycine max
  unsure (1)..(54): unsure at all Xaa locations
  Clone ID: TF_LIB3170-033-Q1-K1-B1.pep
QFVYLAKLPEQAVRNEEMEDFMHNDAVEWTPATXLTVDDHNLLSVAYKNENGSL

SEQ ID NO: 29939 - protein, 140 aa, Glycine max
  unsure (1)..(140): unsure at all Xaa locations
  Clone ID: TF_LIB3106-074-Q1-K1-A6.pep
EKERERVRNCFKFANPKFGKGGYGCLQGSRELRLHRQARRTGRAILSDSGINAERSATRRRTNCKAAKDPNKPKRPPSAFFDFMDDFKNVFNIXHPENKSSSAVGKATGAKCKTMSDAEKAPYVAKSDKRTVEHEKIMPA

SEQ ID NO: 29940 - protein, 96 aa, Glycine max
  Clone ID: TF_LIB3167-080-P1-K1-C4.pep
KGKGSNPGQYKAYPGFGTFFMNSTLSLERSACPAHFAKGTFPSRGGTGLFQIPGSRRLYPKKWKIPVWKGVTEREPLKEKKVGPLTRTGVVRPRNS

SEQ ID NO: 29941 - protein, 104 aa, Glycine max
  Clone ID: TF_LIB3242-758-P1-K1-F4.pep
YRTLSKILRVLKIEHKEAWALGIQHHITDCQPLYELRRFLIWHKEMAFRVNLHERKYTTHQTYQGYQGSFRWSWTSYGQRVRLAAKRCIMCVLSLTVFCFKVCS

SEQ ID NO: 29942 - protein, 86 aa, Glycine max
  unsure (1)..(86): unsure at all Xaa locations
  Clone ID: TF_10847191.pep
ELTIEERILLSVPYNNVIRARRASWRIIFSIXHKEESRGHXDHLFLILYYRFKIYSYLCNICHRMLKLLHCFLIPSTSSGYFKVLY

SEQ ID NO: 29943 - protein, 74 aa, Glycine max
  unsure (1)..(74): unsure at all Xaa locations
  Clone ID: TF_700977595H1.pep
FAEXKXRRXPGKXAAXRRFXRLPKXFKDIDNXELXLNSXLXGWVCSEFSVXYYXILNSXDRACRLXKXALXKXL

SEQ ID NO: 29944 - protein, 126 aa, Glycine max
  unsure (1)..(126): unsure at all Xaa locations
  Clone ID: TF_GmC1228_5.pep
MPAEAELPPTHPIRLGLALNFSVFYYEILNSPERYDFYFIFLTVLLFKCQPLCVLCAXVGPCLTNLTPYSSYLRACHLAKQAFDEAISELDTLSEESYKDSTLIMQLLRDNLTLWTSDIPEEGGIH

SEQ ID NO: 29945 - protein, 135 aa, Glycine max
  unsure (1)..(135): unsure at all Xaa locations
  Clone ID: TF_LIB3040-008-Q1-E1-D4.pep
RSRITGLTHASGENTTARKSVLGAPRSSWRILSSIQHHAYTNGNYLSANQHIEYIRTVELDLAIICCDVMIVIDEHLMPSAATGESTVFYYHIIRHYYRYLAKFQSSPDTNEAADQSTIASESATAAXQADLPPT

SEQ ID NO: 29946 - protein, 77 aa, Glycine max
  unsure (1)..(77): unsure at all Xaa locations
  Clone ID: TF_LIB3108-043-Q1-K1-D1.pep
KNFFEPPRPLWPLFSLFDQKGETPGTGFNISIFRNYRSKILSNFSNFXNVFLKLLNFRLIQSVFSGISKVFSFKLKG

SEQ ID NO: 29947 - protein, 182 aa, Glycine max
  unsure (1)..(182): unsure at all Xaa locations
  Clone ID: TF_uC-gmroLIB3259P150a03b1.pep
MASAPTPHKEIMYMAKLAEQAKRYKDMAEFMETVSSSVESXELXVEERTLLSVPYNNEIIARQSSWRIMCLIEQMEESRXTNDHVASSETSRPRSKPSSXNICDGMLKLLNTRLVRCDDCGDYKDFYLMMKADYHMHLAEFKTGSNPREADQSTLSCYTASHDIAHTELPTTDPMRLRLALN

SEQ ID NO: 29948 - protein, 116 aa, Glycine max
  Clone ID: TF_uC-gmflminsoy062f07b1.pep
VFFSLGSFFLVICGLVAPRGPSCAVRIFVSRCRVGSFLPLFVLGRVFASFFVRSPFLRFCGPARLVWPGVLGSLSLFRRAWFLCAFSLPAAGCVRGLPFKGSPWGSVSSWVGCLFG

SEQ ID NO: 29949 - protein, 172 aa, Glycine max
  unsure (1)..(172): unsure at all Xaa locations
  Clone ID: TF_LIB4200-001-Q1-K1-H5.pep
ENIDTAKLAXKTARYEEMVVFMAKXNTVVAEVLTKEERNLLCVSYTNGIDTXRALWMIMSSIVLQDESIGNVDHVVIIKEDRCVNEGXLIMNCDGILNLLESNLIPFIAFPDSKIHFLEMKGDSEETLAQFKTGAETKDADESTFIADRXSHDIAFVDLAPTHPIRLGPALT

SEQ ID NO: 29950 - protein, 107 aa, Glycine max
  unsure (1)..(107): unsure at all Xaa locations
  Clone ID: TF_10842944.pep
HLPHEENVYIDKLAVQAECYEXMVEXLERVSFGADNNELTXEEMNLFLPACWNVIRARRAWWLIISSIEQKEESLSHHDHVSGMLHYRVMIVSELCNICDVVLKLLD

SEQ ID NO: 29951 - protein, 131 aa, Glycine max
  Clone ID: TF_uC-gmroLIB3259P238b03a1.pep
KKKDSPKRAPPLAKQAFYGAIWGLGPPREGSYKGPPFFKQLFKNNPTFWASDFPKGGGGGPKKAEKAQPFGPEPLCGSGVKNLRGSPKGPFSAFFPKDLGPPKRTGGAHSKILVFFKIFSQARRLAPLFFP

SEQ ID NO: 29952 - protein, 38 aa, Glycine max
  Clone ID: TF_LIB3051-099-Q1-K1-H7.pep
FQKEGAHNTLSTYKAAQHIPNTELPPTHPTTLNLALNY

SEQ ID NO: 29953 - protein, 62 aa, Glycine max
  Clone ID: TF_11413695.pep
YHFDCKTRPARIEGGESTLCAYRAVQDIANTVLTTTHPIMLGLALNSSVFDYDILISTARAC

SEQ ID NO: 29954 - protein, 179 aa, Glycine max
  unsure (1)..(179): unsure at all Xaa locations
  Clone ID: TF_12488454.pep
NVYMANVAEQAERYLXMVEFMEKVSAAADNXELTVEDRNLLSVDYYNVDRRRPXALCRIISSIDQKEESRGNNDHVYVILDYRSKIESXELSNMCNGILRLVDSHMMLSAFCGDSKVCYLKMKEDDHRYLAEFMSGAKRREASDSTLSACRVAQHDANARSDATASDKRGHALDYMYET

SEQ ID NO: 29955 - protein, 250 aa, Glycine max
  Clone ID: TF_GmC548_1.pep
MAGAEGLNREQYVYLAKLSEQAERYEEMVEFMQKVVVGWTPASELTVEERNLLSVAYKNVIGSLRAAWRIVSSIEQKEEGRKNDDHVSLVKHYRSKVENELTQVCASILNLLDSNLVPSVFASESKVFYLKMKGDYHRYLAEFKVGDERKTAAEDTMLSYKAAQDIASGDLPPTHPIRLGLALNFSVFYYEILNQSDKACAMAKQAFEEAIAELDTLGEESYKDSTLIMQLLRDNLTLWTSDVQDQLDEP

SEQ ID NO: 29956 - protein, 290 aa, Glycine max
  Clone ID: TF_GmC548_2.pep
MLSQSFSKCFFIHKIHSFGFVPLPPIAAILLASKSEQEKRMAGAEGLNREQYVYLAKLSEQAERYEEMVEFMQKVVVGWTPASELTVEERNLLSVAYKNVIGSLRAAWRIVSSIEQKEEGRKNDDHVSLVKHYRSKVENELTQVCASILNLLDSNLVPSVFASESKVFYLKMKGDYHRYLAEFKVGDERKTAAEDTMLSYKAAQDIASGDLPPTHPIRLGLALNFSVFYYEILNQSDKACAMAKQAFEEAIAELDTLGEESYKDSTLIMQLLRDNLTLWTSDVQDQLDEP

SEQ ID NO: 29957 - protein, 74 aa, Glycine max
  unsure (1)..(74): unsure at all Xaa locations
  Clone ID: TF_700744868H1.pep
HGGFLLGRRSFTWRPGEXVRYEDIVEFLEKVAKIAEVDELTVEERNLLSVAFKNVIGASRASWRIISSIEQKEE

SEQ ID NO: 29958 - protein, 60 aa, Glycine max
  unsure (1)..(60): unsure at all Xaa locations
  Clone ID: TF_LIB3028-005-Q1-B1-B10.pep
MAASAHTPSKEFVYMAILADHAHRYXEMVEFMRKVSASADNHELSVEERNLLSVGEHNFI

SEQ ID NO: 29959 - protein, 144 aa, Glycine max
  Clone ID: TF_9204460.pep
AAAPSPNEENVYMAKLAEQAERYEEMVEVIENDSAAADNEELTVYERNLLSVTYKNVIGARRTSWRIISSIDHKEESHSNDDHVYVIRDYRSKIYSNLSNICDSILKLLNCLLIPFASSYEFKVFYLDIKADYPQYLIKFKTST

SEQ ID NO: 29960 - protein, 147 aa, Glycine max
  unsure (1)..(147): unsure at all Xaa locations
  Clone ID: TF_LIB4164-027-Q1-K1-A12.pep
PLKDRENFVYIAILVYLAVRFXEMAESMRSAANIPIRTXTAEERNLLSVEHKTATSARTETXRILTCIEQKGETKGNXLYATWTKDSRQEGESKLSNIXDEVXMRASDEHFITAGVRGESTALNYXTTGEYDWDRAECKSSKEKKEA

SEQ ID NO: 29961 - protein, 54 aa, Glycine max
  Clone ID: TF_uC-gmflLIB3260P031c03b1.pep
PTRPFTRPPTRPKDSTLIMQLLRDNLTLWTSDIPEDGAEEQKVDSARAAGGDDA

SEQ ID NO: 29962 - protein, 62 aa, Glycine max
  Clone ID: TF_701044857H1.pep
MAARAPIPREEFVYMANCPEQAERYEEMVEFMEKVSASAESEELPVEERNFFSVAKKNVLGA

SEQ ID NO: 29963 - protein, 77 aa, Glycine max
  Clone ID: TF_GmC418_4.pep
YFVFQDIANAELPPTHPIRLGLALNFSVFYYEILNSPDRACNLAKQVRFRYSEYLGLCFALFIFVLQHFEQCFGCFP

SEQ ID NO: 29964 - protein, 101 aa, Glycine max
  Clone ID: TF_5688049.pep
ASAPSPREENVCMAKLAVLGERYEEMEASMEKVYADVDNQERTAEEMNHLCVAYKNEIGARRASWRIISSIEQNEESRGIDDHMYVNRCYLFKIQSELSSI

SEQ ID NO: 29965 - protein, 218 aa, Glycine max
  unsure (1)..(218): unsure at all Xaa locations
  Clone ID: TF_LIB4203-002-R1-K1-G1.pep
MDKNELVQKAKLAEQAERYDDMAACMKSVTEQGAELSNEERNLLSVAYKNVVGARRSSWRVVSSIEQKTEGAEKKQQMAREYREKIETELRDICNDVLSLLEKFLIPNASQPESKVFYLKMKGDYYRYLAEVAAGDDKKGIVDQSQQAYQEAFEISKKEMQPTHPIRLGLALNFSVFYYEILNSPEKACSLXKTAFDEAIAELDTLSEESYKDSTLIM

SEQ ID NO: 29966 - protein, 263 aa, Glycine max
  Clone ID: TF_GmC518_1.pep
MATFSKERENFVYVAKLAEQAERYDEMVDAMKKVAKLDVELSVEERNLFSVGYKNVVGSRRASWRILSSIEQKEDSKGNELHVKHIRDYRNKVELELSNICSDIMIILDEHLIPSTNIAESTVFYYKMKGDYYRYLAEFKAGNEKKEVADQSLKAYQTASTTAESELQPTHPIRLGLALNFSVFYYEILNSPERACHLAKQAFDDAVSELDTLNEDSYKDSTLIMQLLRDNLTLWTSDIPEEGEDLKMESAARVDQGEDELGR

SEQ ID NO: 29967 - protein, 86 aa, Glycine max
  unsure (1)..(86): unsure at all Xaa locations
  Clone ID: TF_700681991H1.pep
DIAHADLAPTHPIKLSPALNISVLYYEILSTPDRACNIANQASDEAIAALDIPXEEYHKDSTPIMQLLRDNITXWSADTNEDGSDD

SEQ ID NO: 29968 - protein, 88 aa, Glycine max
  Clone ID: TF_LIB3094-060-Q1-K1-D9.pep
MSIKFYNIQSSGKKKGTMSERAPTTLEQVVYMAKLAEHAKRHEEKVEHMANDCNYSESEELTREHHNREWAYYKNVVLSQRAYEFIML

SEQ ID NO: 29969 - protein, 248 aa, Glycine max
  Clone ID: TF_GmC518_2.pep
MCLSGGVWCAEMVEAMKKVAKLDVELSVEERNLFSVGYKNVVGSRRASWRILSSIEQKEDSKGNELHVKHIRDYRNKVELELSNICSDIMIILDEHLIPSTNIAESTVFYYKMKGDYYRYLAEFKAGNEKKEVADQSLKAYQTASTTAESELQPTHPIRLGLALNFSVFYYEILNSPERACHLAKQAFDDAVSELDTLNEDSYKDSTLIMQLLRDNLTLWTSDIPEEGEDLKMESAARVDQGEDELGR

SEQ ID NO: 29970 - protein, 225 aa, Glycine max
  unsure (1)..(225): unsure at all Xaa locations
  Clone ID: TF_LIB4203-002-R1-K1-E7.pep
MGDREQLLQRARLAEQAERYDDMASAMKAVTELNEPLSNEDRNLLSVAYKNVVGARRSSWRVISSIEQKTMADGNEKKLEKVKAYREKIEKELETVCNDVLALLDKFLIKNCNDFQYESKVFYLKMKGDYYRYLAEVASGEKKNSVVEASEAAYKEAFEISKEHMQPTHPIRLGLALNFSVFYYEIQNAPEQACLLAKQAFDDAIAELDTLNEDSYKDXTLIMQL

SEQ ID NO: 29971 - protein, 259 aa, Glycine max
  Clone ID: TF_GmC1228_1.pep
MASTKERENFVYVAKLAEQAERYEEMVEAMKNVAKLNVELTVEERNLLSVGYKNVVGARRASWRILSSIEQKEEAKGNDVSVKRIKEYRLKVESELSNICSDIMTVIDEYLIPSSSSGEPSVFFYKMKGDYYRYLAEFKSGDERKEAADHSMKAYQLASTTAEAELASTHPIRLGLALNFSVFYYEILNSPERACHLAKQAFDEAISELDTLSEESYKDSTLIMQLLRDNLTLWTSDIPEDGAEEQKVDSARAAGGDNA

SEQ ID NO: 29972 - protein, 75 aa, Glycine max
  unsure (1)..(75): unsure at all Xaa locations
  Clone ID: TF_uC-gmflminsoy059f05b1.pep
MSDFSLKENDYRAKLXRSRAERYEEMVEFIEKVAKTVXGEELAVEERNIIYVAYKSLMDAMRALWGIIYYIKVIE

SEQ ID NO: 29973 - protein, 313 aa, Glycine max
  Clone ID: TF_GmC1521_1.pep
MESKWGGAPASIMAANFDDFKWIASMFDPGNDDVKPFSDAAFQNQDAVTAFSTCGGVTDDTLVRSQNLTPIQSTISATIDSQSSFCGTVGSPVSANKPNVRDNQVKGVATTTSGSSREPSDEDDEAGPCEQSTNAIDMKRLRRKVSNRESARRSRRRKQAHLADLEWQVERLRLENANLFKQLTDASQQFRDADTNNRVLKSDVEALRAKVKLAEDMVTRGTLTPINNQILQNQSSLNTPPQLNTNNLHRMTHVSPTITVRGNDDASYGGGITVSGQNSPLGGLGNLDNIPCSDFNSGINSNNAVSSMTSMWP

SEQ ID NO: 29974 - protein, 72 aa, Glycine max
  unsure (1)..(72): unsure at all Xaa locations
  Clone ID: TF_700977467H1.pep
MXSTKXREXFVYTAKLAEQXERXXEXVEAMXNXAXVNVXLTXXEPXLLSXXXKNXVXARXAXWXXXXXXXHX

SEQ ID NO: 29975 - protein, 110 aa, Glycine max
  unsure (1)..(110): unsure at all Xaa locations
  Clone ID: TF_LIB3094-072-Q1-K1-C6.pep
SLIHRSSHASALSLTHTISLSFSHPDLVTRAMSTTPREKVTYMAKHTDHANRYXEMMKLMEKVSAYNDSHELTTEEHNLLSVNYKNVISARHAYXRIISIIEHKEDKRVN

SEQ ID NO: 29976 - protein, 119 aa, Glycine max
  Clone ID: TF_uC-gmroLIB3259P229h02b1.pep
VKHIFGREGNGRENVRPVSGEQEVHKGPSVREPAHQERPAEKERKTQGYLAKLAEQAERYEEMVECRKKAGTLVPDLTAEDRNLLSTGYKNVTGAPRASWSMTPSIEHTDESKGNERTV

SEQ ID NO: 29977 - protein, 62 aa, Glycine max
  unsure (1)..(62): unsure at all Xaa locations
  Clone ID: TF_LIB3242-657-P1-J1-H5.pep
DRENFAYICKLSEXPAFQEMVESMKNXANLCIVLSGEERNLLSVGLTNMIGARRARWRILSS

SEQ ID NO: 29978 - protein, 88 aa, Glycine max
  unsure (1)..(88): unsure at all Xaa locations
  Clone ID: TF_jC-gmXLIB3563P78cg03a1.pep
FGSSARALPERIHLPSLEQNGERGRGNRGPRQPSFRDYRXRSRAELSNICDGMLKLLDTRLVPSAASGDSKVFYLKMKGDYHRYLAEF

SEQ ID NO: 29979 - protein, 101 aa, Glycine max
  unsure (1)..(101): unsure at all Xaa locations
  Clone ID: TF_uC-gmroLIB3259P231f05a1.pep
PPPPNRGGPALNFPGFKXRIFNFPGGGGNPAKQAFYRAIVNMDTLGEGSYKEGPLFNPRGSDNPPPWTFDKQGDGANKIKKAPPQGGGGQKLTNPTRGVRP

SEQ ID NO: 29980 - protein, 92 aa, Glycine max
  unsure (1)..(92): unsure at all Xaa locations
  Clone ID: TF_LIB5118-006-B1-PF1-D4.pep
MEDAPSPREKNVYMANIAQQAERYEKKVELMKKVSSFXNTHHPTGEERNRLSVAYKNEMEERRASGEIFSSIXQKEESHAKXDHDAVIREYR

SEQ ID NO: 29981 - protein, 53 aa, Glycine max
  unsure (1)..(53): unsure at all Xaa locations
  Clone ID: TF_LIB3242-769-P1-K1-A8.pep
QTRGQTRGVEFMEKVFSSSRSFXLTVEDLNLLSVNYKNVIGTRRASCNIIFSI

SEQ ID NO: 29982 - protein, 72 aa, Glycine max
  Clone ID: TF_LIB5118-021-A1-PF1-A6.pep
RPLRRRADSHILLVPSSHNLHSTHHHSHRDHRMVGAKSLLPHTAHIPCEAVGAGGAVRSYGRRSWIMLSSDA

SEQ ID NO: 29983 - protein, 60 aa, Glycine max
  Clone ID: TF_LIB3049-054-Q1-E1-A8.pep
MSDSSRDENVYNAKLADHVDRYDEMVEFMDNVPDTVEVEELTVDETNLLSVAYNNVIGAM

SEQ ID NO: 29984 - protein, 124 aa, Glycine max
  unsure (1)..(124): unsure at all Xaa locations
  Clone ID: TF_14991060.pep
GNFSRILEKFKVGNEKKKGANQPLKAYETLSPPVERELHPTLPIRWGRVQNSPGFNKKIMNPPERAGLLAKQAFNNVASNLNPLKEDPSKARPLIMQLLRNTLXLXTSDIPKKVEAQKLETPPR

SEQ ID NO: 29985 - protein, 42 aa, Glycine max
  Clone ID: TF_LIB3094-073-Q1-K1-C4.pep
KVSDYFEYQNLTDNARNLLSLSYQNCINATLASPLIICSIYL

SEQ ID NO: 29986 - protein, 73 aa, Glycine max
  Clone ID: TF_700755182H1.pep
LTHTFSLSLSHPDRVAIASAPTPRAAFVYMAKLAEQAARYEEMVDFMEKVTASAERDELTVEERNLLSVAYKN

SEQ ID NO: 29987 - protein, 101 aa, Glycine max
  Clone ID: TF_LIB3242-403-P1-J1-G11.pep
IRLELTHTLCIYLYQPDLVATASAPTPREELVCMAKLAEQAKRYKETVEFMENVCSSAESEELTVEERNLLSVDYKNVNGARRAYRRIISLIEQKEESRGI

SEQ ID NO: 29988 - protein, 69 aa, Glycine max
  Clone ID: TF_8282709.pep
HMSVIRYYRSKIVAVLYNVYYGILYLVDTLLVHFVVYGDFKVLYLKMKGDYHRYLVEFKTVADLNDAAE

SEQ ID NO: 29989 - protein, 101 aa, Glycine max
  Clone ID: TF_jC-gmro02910042d09a1.pep
MLWLEMVEAMKNVAKLNVELTVEERNLLSVGYKNVVGARRASWRILSSIEQKEEAKGNDVSVKRIKEYRQKVESELSNICSDIMTVIDEHLIPSSSAGEPS

SEQ ID NO: 29990 - protein, 73 aa, Glycine max
  unsure (1)..(73): unsure at all Xaa locations
  Clone ID: TF_uC-gmropic116f05b1.pep
NEETXEPTEKXAKXXEAEEPTXEERXXXXXXNKNXXXARRXXXRNXXPXEQKEESRGXEDHXAXXKEXRGKXE

SEQ ID NO: 29991 - protein, 259 aa, Glycine max
  Clone ID: TF_GmC1228_2.pep
MASTKERENFVYTAKLAEQAERYEEMVEAMKNVAKLNVELTVEERNLLSVGYKNVVGARRASWRILSSIEQKEEAKGNDVSVKRIKEYRQKVESELSNICSDIMTVIDEHLIPSSSAGEPSVFFYKMKGDYYRYLAEFKSGDERKEAADHSMKAYQSASTTAEAELPPTHPIRLGLALNFSVFYYEILNSPERACHLAKQAFDEAISELDTLSEESYKDSTLIMQLLRDNLTLWTSDIPEEGAEEQKVDSARAAGGDNA

SEQ ID NO: 29992 - protein, 395 aa, Glycine max
  unsure (1)..(395): unsure at all Xaa locations
  Clone ID: TF_GmC1521_2.pep
MVKETEYYDVLGVSPTASEAEIKKAYYIKARQVHPDKNPNDPLAAQNFQVLGEAYQVLSDPAQRQAYDAHGKSGISTEAIIDPAAIFAMLFGSELFEEYIGQLAMASMASMDIFTEGEQFDSKKLQEKMRVVQKEREEKLAEILKNRLNQYVQGNKEGFVNDAEAEVARLSNAAYGVDMLNTIGYIYARQAAKELGKKAIYLGVPFIAEWFRNKGHSIKSQVTAATGAIALIQLQEDMKKQLSSEGDYTEEELEEYMQNHKKLMIDSLWKLNVADIEATLSRVCQMVLQDNGAKKEELRARAKGLKTLGKIFQRVKSANGNENESVXNKAVHKLNGSETGNDTSPSTSPKSSSPDFSSQSPYVEAPRFAGMQFDYNFPRPTAPPGAQRPTSTSKD

SEQ ID NO: 29993 - protein, 109 aa, Glycine max
  unsure (1)..(109): unsure at all Xaa locations
  Clone ID: TF_jC-gmst024131g06a1.pep
LELRCSIHLRWFCRTTRKGYLHYRAVTPREEIMYMAKLVVPAQRYEEMVGYKEIGLRLKXSEELTVEERNLLFVXLRNVIWARRAFWRIITSTVQKGESRGDEEPLLQL

SEQ ID NO: 29994 - protein, 82 aa, Glycine max
  Clone ID: TF_700746076H1.pep
PGGAASAETQPSQATERRSRSSTVSSSLSAEAETFSTNSTISSQRSACPPLRHALALFARSGSARHRHKTSARETQRESSSR

SEQ ID NO: 29995 - protein, 70 aa, Glycine max
  unsure (1)..(70): unsure at all Xaa locations
  Clone ID: TF_uC-gmroLIB3259P220d12a1.pep
ASPDRACSLAKQAFVEGIAGLDPLXEESSLGCAVVRQLLGDSLTLWTXHRQEDGAHAIRDAAPTGGWARH

SEQ ID NO: 29996 - protein, 141 aa, Glycine max
  unsure (1)..(141): unsure at all Xaa locations
  Clone ID: TF_GmC1228_4.pep
LEVFFYKMKGDYYRYLAEFKSGDERKEAADHSMKAYQSASTTAEAELPPTHPIRLGLALNFSVFYYEILNSPERACHLAKQAFDEAISELDTLSEESYKDXATLIMQLLRDNLTLWTSDIPEEGAEEQKVDSARAAGGDDA

SEQ ID NO: 29997 - protein, 98 aa, Glycine max
  unsure (1)..(98): unsure at all Xaa locations
  Clone ID: TF_9902456.pep
ASATTPREEFVYMANLAEQAERYDEMVEFMEKVSGNAENXELTVEEHNQLCVTYKNRIRTSRACWRIISXIEQNEESQGNEDHGPVIRSYRSQIKAEL

SEQ ID NO: 29998 - protein, 48 aa, Glycine max
  Clone ID: TF_LIB4200-007-Q1-N1-E11.pep
LAKQAFYEAIVELDPLGGESSKDSPLVMQFFCDTLTLGAFYKQDNGAN

SEQ ID NO: 29999 - protein, 52 aa, Glycine max
  Clone ID: TF_11274056.pep
FSVFYYEILNSPDRACNLAKQVRFRDSEYHGLCFALFICVLLYFEQSFGCLT

SEQ ID NO: 30000 - protein, 69 aa, Glycine max
  Clone ID: TF_GmC566258_1.pep
MSRRSNYDRYGPAFTHPLSRPSHAETYDEMVQCMKIVAQLDLGLTVDGRLLLSVGYVTVIGSRRASWRV

SEQ ID NO: 30001 - protein, 145 aa, Glycine max
  Clone ID: TF_uC-gmflLIB3275P131g01b1.pep
HIAAAEGLYFMAKLLLEGGASVFTKDRWGNTPLDEARMCGNKNLIKLLEDAKSAQLSEFPSQEYTDKMHPKKCTVFPYHPWDPKDNRRHGIVLWIPHSIQELIKSAAEQIEFSGDACILSEDAGKVTDVDMIKDGQKLYLVHETH

SEQ ID NO: 30002 - protein, 291 aa, Glycine max
  unsure (1)..(291): unsure at all Xaa locations
  Clone ID: TF_GmC27269_1.pep
MSTAEAPPSFQEAARCVVCNCSFNTFRRRHHCRSCGRTLCNEHSSNQMALPQFGLYSNVRVCADCFNNLRSGKDEPQTSSDGVNSVTDTISKLDINANVDSKSILTAETKLLSGIKECKCGMPLCICEAPTPSSDAFPQQKPNPVIAAPSNPKPKKTDTVPKIRSSISTSKFSSMFNVGHVTNGTSDRPQIDYEVTGEGLREAIKNSDVAAVKKLLNEGVDANYRDKQGLSLLHLAAVFNQTDIVFILMDSGAXWSTTMDQGETPIDCVYLSLQYKMRKKMEEGGTVDQSI

SEQ ID NO: 30003 - protein, 136 aa, Glycine max
  Clone ID: TF_GmC133757_1.pep
MTFPSMGIVANWVLLWLKLSIYSHWNPKVLFLELDRTHKRQIYIAASSGNWSEALSYFKIHPHWWRIPLTSRGVTALHVAVSMRKTSFVEKLVDRVDRMNMQDLEIRMADGNTAFCLAAITGNVKCAKILLGKNPG

SEQ ID NO: 30004 - protein, 150 aa, Glycine max
  Clone ID: TF_uC-gmropic020c12b1.pep
MRSETLEKVNSDMEAKGVRFLAYQSIFSSVGSGDFDGVKKLVEEAKKEEGSSLSDVMSLQNDAGETALYIAAENNLQEMFSFLLSICHFEVDKIRSKADMNAFHVAAKRGNLDIVRELLNIWPEVCKLCDFSNTSPLYSAATQDHLDVVD

SEQ ID NO: 30005 - protein, 323 aa, Glycine max
  Clone ID: TF_GmC4222_2.pep
MESKNPARFTLGKQSSLAPERHNKEAELQKDGEAVDQGVRLMYSAFEGDVDGIREALESGVSVNYKDIDNRTALHVAACEGFTDVVDLLRQKGTEYLPKGDLRDFLKRKGALKPSTAVRFALDIARGVGYLHENKPSPIIHRDLEPSNILRDDSGHLKVADFGVSKLLAVKEDKPLTCHDTSCRYVAPEVFRQEYDTKVDVFSFALILQEMIEGCPPFSAKQDDEVPKVYAAKERPPFQAPAKRYSHGIRELIEECWNENPAKRPTFRQIITKLESIYNTIGHKRHWKVRPLKCFQNLEALLKRDHSNGSSRGGSSRSTSSRI

SEQ ID NO: 30006 - protein, 70 aa, Glycine max
  unsure (1)..(70): unsure at all Xaa locations
  Clone ID: TF_LIB4164-057-R1-N1-B9.pep
LPYLQTYFGFLXLMFIINLQTYFQCLFPYGFILLALNMEERKNGNALDSAYVGNNAWEHRLCGEASSSRS

SEQ ID NO: 30007 - protein, 220 aa, Glycine max
  Clone ID: TF_GmC238964_1.pep
MAKSSKDPTTSYPAIKSEQYLHSPVHYAVAIRDHTKLSRIISSLPRVPDPARVITESDSLTQERVAEKISAVLDRRDVPFRETPLHLAVRLNDVSAARAIASAGADISLHNAAGWNPLQEALCRRASEIAQVLVRLHHRAAWAKWRRRLPRLVAALRRMRDFYMEISFHFESSVIPFVGKIAPSDTYKIWKSDGNLRADTTLAGFDGLKIHRADQSFLFL

SEQ ID NO: 30008 - protein, 178 aa, Glycine max
  Clone ID: TF_uC-gmflLIB3275P093b11b1.pep
MDHNHHHRHHNHNHALHTTPLSEPTTPTTPRPTLFLSTSGKALLLSNSNKRLDTPRKKYVKQVTGRHNDTELHLASQRGDVDSVRHVLAEIDSIMMGSLEFDAELADIRSAIFNEVNDLGETALFTVAEKGHLDVVRELLPYTTDDALSSKNRSGFDTLHIAASNGHLAIVQALLNHD

SEQ ID NO: 30009 - protein, 227 aa, Glycine max
  unsure (1)..(227): unsure at all Xaa locations
  Clone ID: TF_GmC60497_1.pep
RVSCEIEGRERERMEQIPLFNEKMKLAQKAAMAKRWEDFKKIMKDDQENLLKQFDLFENSAIHVATRSNSPRLLRELIEMLPKEERWQALCKENREGNTVLHEVVFCKKKKMADVVFEIEDELLLQQQSSSLEEKRTLLDMRNHRGETPLFMAAMHGKLKMLKHMANRTGTRNMEDFRKHLHRSDKYSALHASVMGQHXDVAIWLVRMNRELAMXKDEKELTCLQLL

SEQ ID NO: 30010 - protein, 167 aa, Glycine max
  unsure (1)..(167): unsure at all Xaa locations
  Clone ID: TF_GmC1132_2.pep
NVDSKDXNDTTAIQIAMAENHVDMVHLLVMNGADVSDVHNHEFCSSTLDEMLQKREIGHLINVTEVMRSGVVLKGKHQEQELNGGRSNGLKFPRVSIYRGHPVVRREKGSVEAGKLIRLPDSLEELKTIAGEKFGFDAKDAMVTNEEGAEIDSIDVIRDNDKLFFVE

SEQ ID NO: 30011 - protein, 195 aa, Glycine max
  Clone ID: TF_GmC252_1.pep
QASGTFMPALGTVFKRLGFPPIELDNPHVPLPRRHVDRRPPLGVHRIHFQLLAVVAVALQLKLHRVDSVHCRGLVKNRFVDFAAGGFQKLHRLEAPNPNCERHEGFRRRAANPRRRRRCRIPWRRGGRRGRRGGRVWRIVGGGVRRWPFGWGAWWLGRLWRREGRREGVDQRAERVVVCKKQKRVGELWRRVCGG

SEQ ID NO: 30012 - protein, 114 aa, Glycine max
  Clone ID: TF_GmC77836_1.pep
MSSDALKVAAEGNNIDGLYQEIQQDPRILESIDSIPFVETPLHVAATLGHFEFATEIMTLKPSFAQKLNPEGFTPIHLALQCNHDEMVLRLVEMNKDLVRVKGREGLTPLHLAS

SEQ ID NO: 30013 - protein, 81 aa, Glycine max
  Clone ID: TF_GmC673008_1.pep
MMTLVDELETLVDELDALDLGSSVVPVKKVPYGDVFEASRAGDVERLRYLLEAGVNVNARDQWDSVALYYACLAGHLDAAR

SEQ ID NO: 30014 - protein, 308 aa, Glycine max
  unsure (1)..(308): unsure at all Xaa locations
  Clone ID: TF_GmC84_2.pep
AAAAEAKEKEKARVSRTSLILWHAHQNDAAAVRKLLEEDPSLVKARDYDSRTPLHVKSLHGWVEVSKCLIEFDADVNAQDRWKNTPLADAERAKRTAMIELLKSHGGLSYLXQDFRHEVNLLVKLXRHPNVVQFLGAVTDKKPLMLITEYLRGGDLYKYLKDKGALSPSTAINFGLDIARGMAYLHNEPNVIIHXDLKPRNVLLVXGADHLKVGEFGLSKLIKVQSXMTGETGSYCHMAPEVLKYRRYDKKVDVFSFAMSEMLEGEPPFSIXEPYDGAKYVAEGQRPSFRAKGYILNCKTVVVVGGWG

SEQ ID NO: 30015 - protein, 149 aa, Glycine max
  Clone ID: TF_GmC39086_1.pep
MEANGIAHDSSSLGAGRRDKREVGDKMVEDLSKYAHSPAHLAVARRDHASLRRIVSALPRLAKAGEVHTEAESIAAELQADEVSTFIDRRDVPGRETPLHLAVRLRDPVSAEILMAAGADWSLQNEHGWSALQEAVCTREEAIAMIIAR

SEQ ID NO: 30016 - protein, 276 aa, Glycine max
  Clone ID: TF_GmC124507_1.pep
MEIRLEIRGVETAKEAWNRLGALYSSQLKADPDIEQGVVDDSLHEYKPLHRYVESGDWKNAKSMINKDVKAIFSTSSTGRTVLHVAVIAGYENIVRNLVKIGKEKLVKMQDNYDYTALALAAEYTGNVNMAKCMVDQKKGGKDLLLIKTKGGEIPVLLSAAKGYKDMTRYLYSQTQLEAFIDKNSHIGVLLLARCITAEIFDVALSLIHRIPKLPLTHESDGQRPLYALAHMPCAFPSGSGFGRLQQLLYDRRFCDMALNFPPVKLLGRLLIFLYL

SEQ ID NO: 30017 - protein, 112 aa, Glycine max
  unsure (1)..(112): unsure at all Xaa locations
  Clone ID: TF_22541747.pep
RDLALLTNAKGETPLHIAAXGHSNITNLLVEHVKAFPAANKFMRARNDEKDTALHEAVRNHHIEVVKTLLEMDPDYSYETPLYLPSERQYQQVVAQISNKVKAPAYVGPNNQ

SEQ ID NO: 30018 - protein, 121 aa, Glycine max
  unsure (1)..(121): unsure at all Xaa locations
  Clone ID: TF_GmC88220_1.pep
MMNNLTIETEDSFASLLELAANNDVEGFKRMIERDPSCVDEVGLWYSRQKGSRRMVNELRTPLMVAATYGSIDILDLILSLSGCDINNPVAFDKSTALHCAASGGSENXVDVXILLLPAGA

SEQ ID NO: 30019 - protein, 649 aa, Glycine max
  unsure (1)..(649): unsure at all Xaa locations
  Clone ID: TF_GmC1245_1.pep
AGIDATKYGHSPVHKALVLKDHGELRRILAGLPRLRNXAEFRTEAVSILEEEKADVIASEINQRDVPNHDTPLHLAVKFGDEVATELLKVAGANGSLQNEQSWSVHQEACCIIEEGMGNQLRNHYQPLRXAKFFGRVTGLVIITRKKLALYLESIWLFKKLGIFVITWISPLXSSKFXKRDSTRSADMTLAGXFDGIKSQISVHAILFLGDGSEDGKVPPGSLCMISHKEKEVLNALDDAGFPANDEEVQQEVVAMSKTNIFRPGIDVTQAVLLPQLTWRRQEKTEMVGPWKAKVYDMHNVVVSIKSRGVPGAMTDDELFSSCNENETESEELNDILTEDERRQLEDALRLESTDLNNESDEVIIGHRHSCYEEREIPIEDGNCNKSGENKQEKKGWFGGWRKKDSKPEASKKIAPPRSSLCVEEKVSDLLGDSPSRNQSKPGRHSVEIAVKGDESRRRKDAKASSANSDSRSRHKDGNRENEYKKGLRPILWLSPNFPLKTEELLPLLDIVANKVKAIRRLRELLTTKLPMGTFPVKVAIPVVPTIRVLVTFTKFEELEPVDEFATPPSSPSAAEQESPAVPHFSASSWFQWIKAPYRSSTSAPGSSSRIENIEDPFAIPSDYTWVTAEAKKKKMQEKNKSKKGKSHN

SEQ ID NO: 30020 - protein, 669 aa, Glycine max
  unsure (1)..(669): unsure at all Xaa locations
  Clone ID: TF_GmC335_1.pep
SHEMNHLSLDTEDSLASLLLELAANNDVSGFKRLIECEPSSIDEVGLWYGRHKESKKMVNEQRTPLMVAATYGSIDVMTLILSLSEADVNRSSSQDKSTXLHCAASGGSDIVVDAAXLRLTRCRYRNTCNHNVQCSRSSSWILQWRINXGAENGSASLNLLLEAPGGDKCHXSSCAAAELKLVSAEPDEMKKKPVSVNINKKSMMKFSDGRWLQXPKNVRSTKINNPHGRFIFRFSVTKVXSRVRKPEGGVNRINAIVNFXKRAFTRGDMCEYAHGVFECWLHPAQYRTRLCKDGTNCARRVCFFAHTNEELRPLYVSTGSAVPSPRSSASSAMDFVAAISPSSMSVMSPSPFTPPMSPSSASIAWPQPNIPALHLPGSNFHSSRLRSSLNARDFSVDDFDLLLPDYDHHHHQQQQQQFLNELSCLSPHAMNCNTMNRSGRMKPLTPSNLDDLFSAESSSPRYADPALASAVFSPTHKSAVFNQFQHQQSMLAPLNTNFASKNFEHPLLQASLGMSPRNVEPISPMGSRISMLAQREKQQFRSLSFRELGSNSAAASADSWSKWGSPNVKLDWPVGAGEVGKLRRSSSFELGNNGEEPDLSWVQSLVKESPAEVKDKLATTVSYVAAAAAGSSSEGSNISTQMESVVDHAVLGAWLEQMQLDHLVAQQN

SEQ ID NO: 30021 - protein, 110 aa, Glycine max
  Clone ID: TF_LIB3242-347-Q1-J1-H4.pep
NQVLPTVFTFPQFPTISSPNNLILASKPFAGNSRYKHSKTPLHLTTFSGQSKVITYLSKHKADVGASAMDYMAAIHFSSHKGHFEVVLALLSTCAFLKTVTLKSMTSLHY

SEQ ID NO: 30022 - protein, 52 aa, Glycine max
  Clone ID: TF_LIB4164-051-R1-K1-G4.pep
FVYQILEKCRNLVLLPNAKGETLLHIAARYGHSNIAKLLVQRVKAFPPAGRL

SEQ ID NO: 30023 - protein, 126 aa, Glycine max
  unsure (1)..(126): unsure at all Xaa locations
  Clone ID: TF_LIB3242-687-P3-J1-C12.pep
TRLEVGATCLHYAAYYGHTNCLTAILSAAHSTPRCRDLGRGXFADIRHGNRATPMHLAARHRWADCLHALIDNGALGRASTGGYGYPASTPLHMADRGATIDLSPGRVGIKSITTTLSLLCIRNIP

SEQ ID NO: 30024 - protein, 169 aa, Glycine max
  unsure (1)..(169): unsure at all Xaa locations
  Clone ID: TF_GmC167955_1.pep
MAVADSISFQEQLLQRVASAQFRKPLLHLVSTQEDKGRYLTQCVPLHKASLKGDWKEARKLLDQDGSLLKTAITKGGWATLLHIAVGANRVHFVEELLKLMQPEELELQDHKGNTAFCFAAAVGNVQIAEMMERINASLPTIRGXRRTXTPLHLAVLQGKKRNGMASVP

SEQ ID NO: 30025 - protein, 103 aa, Glycine max
  unsure (1)..(103): unsure at all Xaa locations
  Clone ID: TF_LIB4167-039-R1-K1-A1.pep
MSFEDVNAAVSEFARRFNPILKGDWESTKAFLDNDPSALTAKVTAIGGTALHAAAVGGQWQIIEKLVQHVPAQVLSDLDLMGCTCLHYVAMGESTSAAKALXG

SEQ ID NO: 30026 - protein, 111 aa, Glycine max
  unsure (1)..(111): unsure at all Xaa locations
  Clone ID: TF_LIB3028-044-Q1-B1-F5.pep
NGTAGGGSIIANDKKAVYRHIVKSEVNLNAIINGKAGFSSNTPSSINPDISCESKTPQVEDIHDGSSVLHLACIISDSAMVELHRQXGADVNAIDSRGRTPLHYSTMRGKN

SEQ ID NO: 30027 - protein, 568 aa, Glycine max
  Clone ID: TF_GmC64_1.pep
MEVFFSQCVPLYKHALDGNWQAAKHILDANPALKTAAIAPGWPTVLHVAAGTNHYHFVEELLNILDNDAIQLQDKKGNTAFCFVAAAGNWRIAELMQKRNILLPTVKGGDGMTPLHFAALQGRCPMACKLYPMTKEMFDDEDWELLFFTCIKTCNYHLALKMVRDRKELAFARDGNNGEEKKGGIALHLLAQNQKPLDSCCHCHQHQIPVKINPGMKQHVFLQLVNFLWNTLLENIDSKSKILDIISEPSHLLFDAAEVGNFGFLSELISAYPSLIWEVDSRNRSIIHTAVLNRHASIYNLIHEIGSIKDIIVTFAGEEDENTLLHLAAKLAPPSQLELVSGAAFQMSLEISWFEEVNKIMPPSFRWMKNSEGLTARELFTKEHADLRKNAESWMKRTAESCMLISTVIATGVFSAAISTPGGMNDESKEPNYLDKTSFLIFAVSDATSLISSATAILIFLSILISRYAEYDFHKSLPLKLIFGLISLFISITSMMVAFGCSFFITYYYGMKWVPSFISVLACLPILLFIGLQFSLWSVIIYSTYYCKALFKPGKKMLYVVERKGYNV

SEQ ID NO: 30028 - protein, 310 aa, Glycine max
  Clone ID: TF_GmC78648_1.pep
MLRHLRLEDFLSLKPVDPSNHSFEGDMEKRNLIFKLISLREEEEYSIKDEVTTELDISQHMVKEHLFHKQFKEKLYSWLLHKVTESGKGPNVLDEDGQGVLHLAAFLGYDWAINPIISAGVNINFRDVNGWTALHWAASCGRERTVAVLVSMGADCGALTDPSPSSPAGRTAADLASSYGHKGISGFLAESSLTHHLETLTMDDQKGGRQEISGMKAVQTVSERSATPVHFGDMPDLCLKDSLTAVRNATQAADRIHQVYRMQSFQRKQLTQYESDELGLSDQQALSLLASRACKSGQGDGLANAAAVQI

SEQ ID NO: 30029 - protein, 399 aa, Glycine max
  Clone ID: TF_GmC797_1.pep
RQDRYRCAAACSAVDVSSMFIVRKNGKSSLHNAARYGVHRIVKTLIALDPGIVCIKDKKGQTALNKAVKGQCTSVVEEILLADPSILNERDKKGNTALHMATRKCRSQIVGLLLSYSAVDVNAINKQQETALDLADKLPYGDSALEIKEALAEYGAKHARYVGKEDDAMELKRTVSDIKHEVQSQLIQNETTRRRVSGIAKELKKLHREAVQNTINSVTLVAVLFASIAFLAIFNLPGQYITDEGKEIGKAKIADHVSFQVFCLLNSTSLFISLAVVVVQITLVAWDTRAQKQIVSVVNKLMWAACACTCGAFLAIAFEVVGKKTWMAITITLLGVPVLVGTLASMCYFVFRQHFGIFRSDSQRRIKRASGSKSFSWSYSANISDLDEYNSDIEKIYAL

SEQ ID NO: 30030 - protein, 352 aa, Glycine max
  Clone ID: TF_GmC42_23.pep
MASDSKKDFPADDKAGTEESKTSKDETSSKDSPAEQRATATFGPRPGPAGLPGNPFDLSAMSGLLNDPSIKELAEQIAKDPSFNQMAEQLQKTFQGAPQDAIPSFDNQQYFSTMQQVMQNPNFMTMAERLGNALMQDPSMSAMLESFSNPSNKDQLEERMARIKEDPSLKHILEEIETGGPAAMMRYWNNEEVLQKLGQAMGLANSGDAGASAENSGADETEDLGNEDESIVHHTASVGDVEGLKNALASGADKDEEDSEGRTALHFACGYGEVKCAQVLLEAGAKVDALDKNKNTALHYAAGYGRKECVALLLENGAAVTLQNMDGKTPIDVAKLNNQNEVLKLLEKDAFL

SEQ ID NO: 30031 - protein, 251 aa, Glycine max
  Clone ID: TF_GmC265_1.pep
MGNPRKPSTADELHTAARSGDLIAVNSILASNPLAVNSRDKHSRTPLHLAAFSGQAEVVTYLCKQKADVGASAMDDMAAIHFASQKGHLEVVRALLSAGASLKATTRKGMTSLHYAVQGSHMELVKYLAKKGANLGAKTKAGKTPLDLATNEEIRSFLEEYEKSAKNGELGKKDKDKAEESDPKTSTLGSEGDLSSEPAAAAIDEEDNVGEKRKKGNEDGTREEESSQPKKARVNLSHLQSSDDTQEEENL

SEQ ID NO: 30032 - protein, 327 aa, Glycine max
  Clone ID: TF_GmC5728_1.pep
EPFYISRQREPSITSLQWRKIAREVEFNSKVEKKRRGLIPLRDMNLDDYKAYKEAKLAQMKLLDYSSSFPVDENVPEPQLNRGEKFEAEAELDGGERVAPKNPRWAVYGRGLEDVTEFFNSDNYDPTAKTPGGRRKLFNKEEKVLLNKRIPDLAAATSDKWLPLHTLAACGEFHLLDSLLKHNVDINAVDKDGLTALHRATIGKKQVIINYLLRNSANPFVQDNEGATLMHYAVLTASTQTIKILLLYNVDINLQDNYGWTPLHLAVQAQRTDLVRLLLIKGADKTLKNEDGLTPLDLCLYNGQSARTYELIKLFKQPQRRLSHVSV

SEQ ID NO: 30033 - protein, 140 aa, Glycine max
  Clone ID: TF_LIB3093-017-Q1-K1-A6.pep
PTRPVSVCFAAARGDDLLLHQLLKRGMDPNESDNNRRTALHIAASQGKENCVSLLLDYGADPNIRDLEGNVPLWEAIVEGHESMSKLLSENGANLQCGDVGQFACNAVEQNSLNLLKEIMRYGGDITLPNSNTWTTALHV

SEQ ID NO: 30034 - protein, 342 aa, Glycine max
  Clone ID: TF_GmC312_1.pep
RLPKYTGFRTDKKGQTALHMAVKGQNEEILLELVKPDPAVLSLEDNKGNTALHIATKKGRTQNVRCLLSMECININATNKAGETPLDVAEKFGSPELVSILRDAGAANSTDQRKPPNPSKQLKQTVSDIKHDVQSQLQQTRQTGMRVQKIAKKLKKLHISGLNNAINSATVVAVLIATVAFAAIFTVPGQYVEDKTHGFSLGQANIANNAAFLIFFVFDSLALFISLAVVVVQTSVVVIEQKAKKQLVFVINKLMWMACLFISIAFISLTYVVVGSHSRWLAIYATVIGSLIMLSTIGSMCYCVILHRMEETKLRAESRSFSMSHASDQEILNSEYKRMYAL

SEQ ID NO: 30035 - protein, 349 aa, Glycine max
  Clone ID: TF_GmC1132_1.pep
TLTQLLRLKTNTLLEAMQIKREDNIQILKNFLQHFKQVKDLSIKDLMVENVEEEDPNMAVNLLTVASTGNAAFLEELLRAGLDPDIGDSKGKTPLHIAASNGHEGCVKVLLKHACNMHIKDMNGNTALWDAIASKHYSIFRILFQLSALSDPNTAGDLMCTAAKRNELTVMTDLLRQGLNVDSKDHRDTTAIQIAMAENHVDMVQLLVMNGADVSDVHNHEFCSSTLNEMLQKREIGHLINVTEVMLSEVVLKGRHQEQEHNGGRSNSGLKFPRVSIYRGHPVVRREKCSMEAGKLIRLPDSIEELKTIAGEKFGFDAKDAMVTNEEGAEIDSVDVIRDNDKLFFCWIS

SEQ ID NO: 30036 - protein, 507 aa, Glycine max
  Clone ID: TF_GmC67_1.pep
RDLFQLVSEMKAEYFPPKEDVILQNEAPTDFYILVTGAVELLVLKNGVEQVVGEANASVRLVIFTEGGEIGVLCYKPQLFTVRTKRLSQLLRLNRTTFLNIVQANVGDGTIIMNNLLQHLKEINDPIMEGVLVDIENMLARGRMDLPVSVCFAAARGDDLLLHQLLKRGMDPNESDNNRRTALHIAASQGKQNCVLLLLDYGADPNIRDLEGNVPLWEAIVGGHESMSKLLSENGANLQCGDVGQFACTAAEQNSLNLLKEIMRYGGDITLPNSSNTGTTALHVAVSEGNVETVKFLLDHGASIDMPDKHGWTPRDLADQQAHTEIKALFDSIGEPKVHSSVAIPVRNSKIKYLGRFTSEPTMTLPLDGSFHGTDGSWSQNQSQNQSRPRRRSNNYHNSLFGILSAAHNGEKYLLSAVDMNNNARNGMKSSSAVGPTRVIISCPEKGEVVGKLVLLPGSFQELVEIGAKKFGFYPNKVVCKDGGEIEDIEIIRDGDHLVFLGASGGC

SEQ ID NO: 30037 - protein, 911 aa, Glycine max
  Clone ID: TF_GmC60185_1.pep
MMMSHNLTGQLVGAEIHGFHTLDDLDVSNTMEEAKSRWLRPNEIHAILCNHKYFKINAKPVNLPKSGTIVLFDRKMLRNFRKDGHNWKKKTDGKTVKEAHEHLKVGNEERIPEYYAHGQDNPTFVRRCYWLLDKNLEHIVLVHYRDTQELQLQGSPATPVNSNSSSASDPAASWIPSEDLDSGVNSAYAVELNDNLTAKSHEQRLHEINTLEWDDLVVPNVNTSTTSNGGNVPYSFQENQSLLSGRFGNVSSNPSAEIPSFGNLTQPVSGSNSAPYSFPDSAILLKNSPISSGGVDTLGTLVNEGLQSQDSFGTWMNIISDTPCSIDESALKASISSVHVPYSSLVADNLQSSLPEQVFNLTEVSPTWASSTEKTKVLVTGYFHNNYENLAKSNLLCVCGDVSVPVEIVQVGVYRCCVPPHSPGLVNLYLSFDGHKPISQVVNFEYRTPILHEPTASMEEKYNWNEFRLQMRLAHLLFASDTSLNIFSSKVSTNALKEARRFSFKTSYISKSWQYLMKSIDDNTIPFSKVKDSLFETALKNKLKEWLLERIILGRKSTEYDAQGQGVIHLCAMLGYSWAISLFSWSGLSLDFRDKFGWTALHWAASYGIEKMVATLLSCGARPNLVTDPTPQYPGGCTAADLAYVKGCDGLAAYLSEKSLVEQFNDMSLAGNISGSLETSSTDPVNAANLTEDQLYLKETLEAYRTAAEAAARIQAAFREHSFKLRYQAVEIMSPEEEARQIVAAMRIQHAFRNYESKKKMAAAARIQLRFRTWKYRREFLNMRRQAIKIQAAFRGFQARKQYRKIVWSVGVLEKVILRWLLKRKGFRGLQVNPAEEETQESDTIAEEDFFRTSRKQAEERVERSVIRVQAMFRSKKAQEEYRRMKLTHNQAMLDELEEFLNSEDDMLPKT

SEQ ID NO: 30038 - protein, 532 aa, Glycine max
  Clone ID: TF_GmC506_1.pep
PDCDYSDADLVVEGIPVSVHRCILASRSKFFHELFKREKESSEKEGKLKYNMNDLLPYGKVGYEAFLIFLGYVYTGKLKPSPMEVSTCVDNVCAHDACRPAINFAVELMYASSIFQIPELVSLFQRRLLNFIGKALVEDVIPILTVAFHCQSNQLVNQCIDRVARSDLDQISIDQELPHELSQKVKLLRRKPQQDVENDASVVDALSLKRITRIHKALDSDDVELVKLLLNESDITLDEANALHYAAAYCDPKVVSEVLGLGLANVNLRNSRGYTVLHIAAMRKEPSIIVSLLTKGACASDLTFDGQSAVSICRRLTRPKDYHAKTEQGKETNKDRICIDVLEREMRRNPMAGDACMSSHTMADDLHMKLLYLENRVAFARLFFPSEAKLAMDIAHAETTSEFAGLSASNSKGSNGNLREVDLNETPIVQNKRLLSRMEALTKTVEMGRRYFPHCSEVLDKFMEDDLPDLFYLEKGTHEEQRIKRTRFMELKDDVHKAFNKDKAEFSRSGISSSSSSSSLRDSVVHYKARKV

SEQ ID NO: 30039 - protein, 296 aa, Glycine max
  unsure (1)..(296): unsure at all Xaa locations
  Clone ID: TF_GmC231432_1.pep
METKKLHPRFSLGRQSSLAPERAGAGDSSEALDPAVRLMYLANEGDSDGIKELLDAGSNVNFTDIDGRTSLHVAACQGRTDVVDLLLRRGAHVDPQDRWGSTPLVDAMYYKNHQVVKLLEKHGARPPMAPMHVQNAREVPEYEIDPSELDFTNSVCITKGTFRIALWRGIQVAVKTLGEELFTDDDKVKAFHYELTLLEKIRHPNVVQFLGAVTQSTPMMIVTEYLPQGDLGAYLKRKGALKPVTAVKFALDIARGMNYLHEHKPEAIIHRDLEPSXILRDDSGHLKVADFGVSKL

SEQ ID NO: 30040 - protein, 460 aa, Glycine max
  unsure (1)..(460): unsure at all Xaa locations
  Clone ID: TF_GmC798_1.pep
MAPDASDALAVRQKVQLFLNAARTGSIDLLKKLALQLDEGKDLAKSVEAIKDANKRGALHFAAREGQTSVCEYLLTDLKLSVDSQDDDGETALIHAARQGHTATAKYLIDHGADPTVASNLGATALHHSAGIGDAELLKYLLSRGVNPDLESDAGTPLVWAAGHAQPAAVSVLLEHGANPHAETDDGITPLLSAVAAGSLACLELLIQAGAKANISGQAEHALADAKIMEVLNYDXCQKLVIGNGQLSDEDGVKLKQQVAARGYPKAVEILFPLTSKVDTIPTWTVDGILEYMQSETRKQQDESINAKETNQPKEADFPEQNVPEVAPEAKKRAAEAKSRGDGAFKRNDHHMAIDFYTQAIDLNPIDATLLSNRSLCWIKLGQAEHALADAKACRALRPDWPKACYREGAALRLLQKFDEAANAFYEGVKLDPENKELVNAFREAVEAGRKFHGTAENKS

SEQ ID NO: 30041 - protein, 74 aa, Glycine max
  Clone ID: TF_17022045.pep
SMVTIRSVIWFLNSCCIVCIMKPYSCIIEGLTCIYTSTTCTAFIIIYIILFLLIKKKTMTYSDHKVPRSNEEYR

SEQ ID NO: 30042 - protein, 105 aa, Glycine max
  Clone ID: TF_LIB3087-005-Q1-K1-G2.pep
MGQSLSCSGNYDHGLFTGGQHGDLEIVTTVLDSDPSVLHQTTLYDRHSPVHIGATNDQIEILSKLLDGSLNPDVLNRHKQTPLMLAAMHGNIACVEKLLQAGANV

SEQ ID NO: 30043 - protein, 315 aa, Glycine max
  Clone ID: TF_GmC6832_1.pep
LDQTALERNKKGHLPVHLACKRGCVEMVKEFFEPGSGWPINPYVLLNQKGQNILHIAAKNGRDNVVEYLLGNCNTGHLHINQKDYDGNTPLHLASKNLFQQVISLITEDKRTDLNLTNEDGLTAGDISKTFEHPMLRGREILSMELSKGAGVPVNHMLHSQRQPQPEKDTSDFQRKSLSEKDTREAFLIVAALLMTVSFAAGFTVPGGLYSSDDPNPKIRGTAVFAGNSGFWIFIIFNTITMYSSAMACGLLSVGIVNRSKLSRFSDLFLTCAFLAASVAFLAAVLLVVANNRLLAGATILIGALHYILYFFVIK

SEQ ID NO: 30044 - protein, 382 aa, Glycine max
  Clone ID: TF_GmC269_1.pep
MEAIFVTKPASHSLLLTKLSPNPKHLFPPHQQSFHNIRHKPTRFRPVIAVFQNQHQQDAAAASNHTEDESYGEVKGIIGSRALEAATGMEYLIEWNDGHAPSWVPADFIAKDVVAEYETPWWTAAKKADESALKNLIESDDGRDVDAVDADGRTALLFVAGLGSESCVKLLAEAGANLDHRDRSGGLAALHMAAGYVRPGVAKVLLDLGADPEVADDRGRTALDLAREILKVTPKGNPMQFGRRIGLEGVIRVLEGAVFEYAEVQEILERRGKGENLEYLVRWKDGGANEWVKAKFVAEDLVKDYEAGLEYAVAEAVLAKRVADEGTPEFLVKWADLEEPTWEPEENVDPELVKAFEGSNNQAQPSSNGPAVVFSNQDSPSL

SEQ ID NO: 30045 - protein, 179 aa, Glycine max
  Clone ID: TF_GmC1249_2.pep
ERKKERKMLEEQPVVLFRKSPSRRRLRSAFATDDRGWTSLHVFARKGDLKLVKKLLNEGMDVNVSAWGPKSKGVTPLHLAAEGGHIGVMDVLLECGADIDARTKGACGWTPLHIAAKERRRDAVKFLIENGAFMPPDISDSRFNPPLHYCPGLEWAYEEMKRLRQEDLSAGETCYSSES

SEQ ID NO: 30046 - protein, 97 aa, Glycine max
  Clone ID: TF_GmC265_4.pep
MGNPRKPSTADELHMAARSGDLIAVNSILASNPLAVNSRDKHSRTPLHLAAFSGQAEVVTYLSKHKADVGASAMDDMAAIHFASQKGHLEGVRALLS

SEQ ID NO: 30047 - protein, 791 aa, Glycine max
  Clone ID: TF_GmC74695_1.pep
MGINSNFSQGEEIMVPYLTTSIAKQHENGSIIKAEGNWQVYDVDSLRMSSWPIDSAYSGSTCEVSCSNCEQEVNDVDFQKSLEQCLLHSHKQNKVLMQNDLQEKLLNEKEKIKSNLEAYGIEDTYLSFKRTLLDGPPAEEGLKKLDSFNQWMSKELGDVEESNKPSTSGGYWDTVETENEVGNTTIPSQGHLDTYVLDPSVSHDQLFSIIDYSPSWAFEGSEIKVIISGEFLRSQHEAEQCKWSCMFGEVEVPAVIIAKGVLCCHTPPHKAGRVPFYVTCSNRLACSEVREFDFQVHYTPEDTTGENRGSTFDTFSIRFGELLSLGHAFPQNSDSISVSEKSQLRSKINSLLREEEDDWDKLLKLTQEEDFSPENLQEQLLQNLLKDKLHAWLLQKITEEGKGPNILDEGGQGVLHFASALGYDWALEPTIVAGVNVNFRDVNGWTSLHWAAFCGRERTVAFLISLGAAPGALTDPCPEHPSGRTPADLASANGHKGIAGYLAESSLSAHLTTLDLNRDAGENSGAKVVQRLQNIAQVNDLDGLSYELSLKDSLAAVCNATHAAARIHQVFRMQSFQRKQLKEYDDDKLGLSDERALSLIKMNVKSHKSGPRDEPVHAAAVRIQNKFRSWKGRREFLMIRQRIVKIQAHVRGHQVRKSCGKIIWSVGILEKVILRWRRKGSGLRGFKPEANSEGTMIQDVSSTDDDYDVLKEGRKQTEQRLQKALARVKSMVQYPEARDQYHRLLNVVTEIQENQVKHESSYNNSEEPREFGDLNDLEALLDEDIFMPTAT

SEQ ID NO: 30048 - protein, 139 aa, Glycine max
  unsure (1)..(139): unsure at all Xaa locations
  Clone ID: TF_jC-gmXLIB3564P099ba06b1.pep
SHEMNHLSLDTEDSLASLLLELAANNDVSGFKRLIECEPSSIDEVGLWYGRHXESKKMVNEQRTPLMVAATYGSIDVMTLILSLSEADVNRSSGLDXSTALHCAASGGSENAVDAVKLLLEAGADXNSVDANGRRPGDV

SEQ ID NO: 30049 - protein, 156 aa, Glycine max
  Clone ID: TF_GmC1587_1.pep
QESSVQAHCPYGEKTTEGNLNAIISGKAGFSSNTPSSINPNISCESKTPQVEDIQDGSSVLHLACIISDSAMVELLLQYGADINAIDSRGRTPLHYSTMRGKNATARVLITRGANPLAVDKEGNTPFKPATEPDTAGKETLALNQQIACPQNLIEK

SEQ ID NO: 30050 - protein, 1020 aa, Glycine max
  Clone ID: TF_GmC516_8.pep
MSPAYLILLLSEGYEYDINDLHQEAQARWLKPAEVMYILQNHEKFQFTQEVPQQPTSGSLFLFNKRILRYFRRDGHNWHKKSGGRTVGEAHERLKVLNVEALNCYYARGEQNPAFQRRSYWMLDPAYEHIVLVHYRNTSEGKLSSGAGAQLSPSSSVYTQSPSPYSTQNPGSTSILGDSYEPNQSFSSPGSTKVTSEIFVLNNKMGHMDWADTESGTSSELEVTQALRRLEVQLSLNEDNFEDIVSFGSKHETVHDSNPKHDQRVISNQEQSAAFSRPDDQGLFYDGCNGRQVFLSSSLWKHQMGREEDHGYPDANEKALWTEQLESHKSSSAVKLPQKNVYMPAENENSVSSARRVPVSNQENSHWLNFNCNNSENCMIYFHLVNLTTFLVYFGVSSTSDSPPMLAAVFSQPQGVDEVKFPAYSSMLETQVINSDYYETLFDQSQIGAPPDANSSLTVAQKQKFTIKTISPEWGYATETTKVIVVGSFLCHPSDSAWACMFGDVEVPIEIIQDGVISCEAPSHLPGKVTLCITSGNWESCSEVREFEYHDKTNSCTRCTQSETEATRSPEELLLLVRLGQMLLSASTIKNDNIESGIPLIKPKADDDSWSHIIDALLVGSGTSSGTVDWLLEELLKDKFQQWLSFRSREKDEETGCSLSKKEQGIIHMVAGLGFEWALNPILTCGVNINFRDINGWTALHWAARFGREKMVASLIASGASAGAVTDPNAQDPTGKTAASIAASSGHKGLAGYLSEIAVTSHLSSLTLEESESSKSSAYLQADRTVNSVSKENLTANEDQASLKDTLAAIRNVTQAAARIQSAFRSHSFRKRRAREATASTGGIGTISEISAMSKLAFRNSHEYNSAALSIQKKYRGWKGRRDFLALRQKVVKIQAHVRGYQVRKHYKVIWAVGILDKVVLRWRRKGAGLRGFRQEMDINENEDEDILKVFRKQKLDVEIEEAVSRVLSMVDSPDAREQYHRMLEKYRQAKAELAGTSDEASLSTSVGDDLFMDDFYPFP

SEQ ID NO: 30051 - protein, 480 aa, Glycine max
  Clone ID: TF_GmC1240_1.pep
MNSRSQDQRSRPAKPATIHGCALSGDLVGLQRLLRDNPSLLNERNPVMAQTPLHVSAGHNRTEIVKFLLDWQGTDKVEMEAKNMYGETPLHMAAKNGCNEAAQLLLACGATVEARANNGMTPLHLAVWYSLRAEEFLTVKTLLEYNADCSAKDDEGMTPLNHLSQGPGTEKLRELLLWHLEEQRKQRAIEACSETKAKMDELEKELSNIVGLNDLKVQLRKWAKGMLLDEKRRSLGLHVGRRRPPHMAFLGNPGTGKTMVARILGKLLHMVGILPTDKVTEVQRTDLVGEFVGHTGPKTRRKIKEAEGGILFVDEAYRLIPMQKSDDKDYGLEALEEIMSVMDSGKIVVIFAGYSKPMKRVIASNEGFCRRVTKFFQFNDFNSEELAQILHIKMNNLAEDSLLYGFMLHPDCCIKALAALIERETTEKQRKETNGGLVDTMLVNARENLDLRLSFDCMDTEELLTITLVDLEAGLQQLTQ

SEQ ID NO: 30052 - protein, 188 aa, Glycine max
  Clone ID: TF_uC-gmflLIB3275P054d03a1.pep
SWVNTFNAFFNGQYYYYFQDKWLPLHTLAACGEFYLLDSLLKHNVDINAVDRDGLTALHRAIIGKKQAITNYLLRNSANPFVQDNEGATLMHYAVLTASTQTVKILLLYNVDINLPDNYGWTPLHLAVQAQRTDLVRLLLIKGADKTLKNEDGLTPLDLCLYNGQCARTYELIKLFKQPQRRLRHVSV

SEQ ID NO: 30053 - protein, 444 aa, Glycine max
  Clone ID: TF_GmC16_1.pep
MGQSLSCSGNYDHGLFTAVQHGDLEIVTTLLDSDPSLLHQTTLYDRHSPLHIAATNDQIEILSKLLDGSLNPDVLNRHKQTPLMLAAMHGNIACVEKLLQAGANVLMFDTSYGRTCLHYAAYYGHSSCLKAILSSAQSSPVSASWGFSRFVNIRDGKGATPLHLAARQRRSECVHILLDSGALVCASTGGYGCPGSTPLHLAARGGSIDCIRELLAWGADRLQRDASGRIPYMVALKHKHGACASLLNPTSAEPLVWPSPLKFISELNPEAKALLEQALMDANREREKNILKGSSYSLPSPSHSDGVADNMSEVSESELCCICFEQVCTIEVQNCGHQMCAQCTLALCCHNKPNPATACLTPPVCPFCRSTITRLVVVKTECHDETDQDSADINCSKLSKSSRKLRHLNDSGSSSFKGLSSVSSFGKLGSRSSGRIAAEWLDKQ

SEQ ID NO: 30054 - protein, 264 aa, Glycine max
  Clone ID: TF_GmC88213_1.pep
MDSNSKAVCFITHQAIFNAVRCGDLEGLKEQLKNKGEEGVSEVMSMQNDAGETMFYIAAEIGLREVFSFLFGLCDMEVLKIRAKSDLNPFHVAAKGGCLDIVREILSTWPEVCTLCDSSNTSPLYFAAIGDHLDVVNAILDVDVSSMMIVRKNGKTALHNAARYGILRIVKALIARDPGIVCIKDRKGQTALHMAVKGQSTSVVDEILQADLTILNERDKKGNTALHMATRKCRPQVVSILLTYTALNVNAINNQKETALDFAR

SEQ ID NO: 30055 - protein, 582 aa, Glycine max
  Clone ID: TF_GmC1882_1.pep
MDHHRHPHHTTPLSEPTTPTTPRPTLFLSTSGKALLLSNSNKSLLLSNSSKRLDTPRKKYVKQVTGRHNDTELHLAAQRGDAASVRQILAEIDSIMMGSFEFDAEVASVRSAIFNEVNELGETALFTAAEKGHLDVVKELLPHTSHDALSSKNRSGFDTLHIAASKGHLAIVQALLDHDPGLIKTFAQSNATPLISAATRGHADVVEELLSRDPTQLEMTRSNGKNALHLAARQGHVSVVKILLRKDQQLARRTDKKGQTALHMAVKGVSCEVVKLILAADAAIVMLPDKFGNTALHVATRKKRTEIVHELLLLPDTNVNTLTRDHKTALDLAEGLPISEEILEIKECLIRYGAVKANDLNQPRDELRKTMTQIKKDVYFQLEQARKTNKNVSGIANELRKLHRAGINNAANSVTVVAVLFAAVAFAAMFTVPGGDNDQGVAVMAHTASFKAFFISNAIALFTSLSVVVVQITIVRGEIKAERRVVEVINKMMWLASVCTSVSFISASYIVVGRRSQWAAILVTIVGAIVMGGVLGTMTYYVVKSKRSRRMRRKKGKFSKTGTQSWRLSSSDDSEINPIYAI

SEQ ID NO: 30056 - protein, 386 aa, Glycine max
  Clone ID: TF_GmC2979_136.pep
PGRHGGTPLHHAAKRDFDSIVNLLLLHGANPLVLNDDCLTALEVARAKGHSNVVRTIESHLCLFSGWLREFHGPGFLEVVAPQLVSKKVWVVVLPVGSRTLAKPYKLELAIYSRLQDAQPHTVIGLWNADLQEPKLHQSDPSVTVVNHTTKTRIKLGPASENDKQQLTWFSNACKGIPQASPAFLQNNVPTGPPTAPPDAEDTELAMAISASLQSAMQERPPFPDTQPSFDASSSSSAVNTDNHGFLGTPNPNTSDSELVQEANPDGNTQHLQSCVNPSALDLNPSAPPITNEIPGDGPIQYPSIDLSPVDMASPDAEKLLKEGQKSAGGSSSSCVICLDAPAEGACIPCGHVAGCMSCLNEVKSKKWGCPVCRAKIDQVIKLYHV

SEQ ID NO: 30057 - protein, 321 aa, Glycine max
  unsure (1)..(321): unsure at all Xaa locations
  Clone ID: TF_GmC311_2.pep
MAEWQSLLQSILVGLIFSYLLAKLISIVVSFKDDNLTVTRASAAETTATRAEQFEDALKRDDAVSSDARPFEEESVVAEHGSVRIDSDGDYDDDWEGVESTELDEAFSAATAFVAAAAADRLSQKVSSDVQLQLYGLYKIATEGPCSTPQPSPLKMTARAKWQAWQKLGAMPPEDAMQKYIDIVTEIYPTWLDGSSLRNKSGDSGGHGSEAKGPMGPVFSTFVYEEEYGSDSQMEAIHGFAREGDMANLLKCIENGVSMNXRDNDGQTPLHYAVTCEREAIAEYLVKHNADIYSKDNDGSSPRDICESNWPCMQHVGEEVN

SEQ ID NO: 30058 - protein, 179 aa, Glycine max
  unsure (1)..(179): unsure at all Xaa locations
  Clone ID: TF_GmC190413_1.pep
MCGGPEKSKSLSTPSSSAVEGSTNGKDMNKLTVHAADSFSCLLELASNNDFEDFKLALVRDVSLISEVGLWYVRQIGSKQIVLEHRTPLMVAAMYGSIDVLKLILSCPETDVNFSCGTDKSTALHCAASGGSVNAVDIVKLLLSAGADIXCVDANGNRPVDVIGVPPKLEGLKAPLKIY

SEQ ID NO: 30059 - protein, 675 aa, Glycine max
  Clone ID: TF_GmC26_1.pep
MCSDSKSKLSSPTLVVMENSNIQKQNLDGLYNSVLLELSASDDYEAFKREVEEKGLDVNEAGFWYGRRIGSKKMGSETRTPLMIASLFGSAKVLNYILLQKGGGVDVNRVCGSDRATALHCAVAGGSESSLEIVKLLLDAGADAECLDASGNKPVNLIAPAFDSLSKSRRKAMEMFLRGGGERDDELMSQEIQERKEAISDNKKEYPVDISLPDINNGVYGTDDFRMYNFKVKPCSRAYSHDWTECPFVHPGENARRRDPRKYPYSCVPCPEFRKGTCQKGDSCEYAHGVFESWLHPAQYRTRLCKDETGCARKVCFFAHKPEELRPVYASTGSAMPSPKSYSASGLDMTAMSPLALSSTSLPMPTVSTPPMSPLAAASSPKSGSMWQNKINLTPPSLQLPGSRLKAALSARDLEMEMELLGLESPARQQQQQQQQLIEEIARISSPSFRSKEFNRIVDLNPTNLDDLLASADPSVFSQLHGLSVQPSTPTQSGLQMRQNMNHLRASYPSNIPSSPVRKPSAFGFDSSAAVATAVMNSRSAAFAKRSQSFIDRGAATHHLGLSSASNSSCRVSSTLSDWSSPTGKLDWGVNGDKLNKLRKSTSFGFRNSGVTASPIAQPEFGAEPDVSWVHSLVKDVPSERSEIFGAEKQQYDLSKEMLPPWMEQLYIEQEQMVA

SEQ ID NO: 30060 - protein, 680 aa, Glycine max
  Clone ID: TF_GmC26_2.pep
MCSDSKSKLSSPTLVVMENSNIQKQNLDGLYNSVLLELSASDDYEAFKREVEEKGLDVNEAGFWYGRRIGSKKMGSETRTPLMIASLFGSAKVLNYILLQKGGGVDVNRVCGSDRATALHCAVAGGSESSLEIVKLLLDAGADAECLDASGNKPVNLIAPAFDSLSKSRRKALEMFLRGGGERDELMSQEMELQMFSVPEKKEGSDNKKEYPVDISLPDINNGVYGTDEFRMYNFKVKPCSRAYSHDWTECPFVHPGENARRRDPRKYPYSCVPCPEFRKGTCQKGDSCEYAHGVFESWLHPAQYRTRLCKDETGCARKVCFFAHKPEELPPVYASTGSAMPSPKSYSASGLDMTAMSPLALSSTSLPMPTVSTPPMSPLAAASSPKSGSMWQNKINLTPPSLQLPGSRLKAALSARDLEMEMELLGLESPARQQQQQQQQLIEEIARISSPSFRSKEFNRIVDLNPTNLDDLLASADPSVFSQLHGLSVQPSTPTQSGLQMRQNMNHLRASYPSNIPSSPVRKPSAFGFDSSAAVATAVMNSRSAAFAKRSQSFIDRGAATHHLGLSSASNSSCRVSSTLSDWSSPTGKLDWGVNGDKLNKLRKSTSFGFRNSGVTASPIAQPEFGAEPDVSWVHSLVKDVPSERSEIFGAEKQQYDLSKEMLPPWMEQLYIEQEQMVA

SEQ ID NO: 30061 - protein, 676 aa, Glycine max
  Clone ID: TF_GmC275_1.pep
MPPSNFPLRWESTGDRWWYASPIDYAAANGLYDLVTELLHLDTNLLIKLTSLRRIRRLEAVWDDESKFEDVARCRSKVARNLMIECETGRGHKHNSLILAGYGGWLLYTAASAGDVDFVLELLGRDPLLVFGEGEYGVTDMFYAAARGKNCEVFKLLLHSALSRKECLGGSEAELEEKLDEGSKVFKRDVMNRAIHAAARGGNWEILKQILASVSVSQVLSYRDSQGCTVLHAAAARGQVEVVRNLIESYDIINSANAQGNTALHVASYRGYLPVVEILIGASHSLATLTNHYGDTFLHMAVVGFRSPGFCRLDKHTELMKQLTSEKIVKMKDIINVRNNDGRTALHVAVVHNIQFDVVELLMSVPSIDLNICDADGMTPLDHLRQKSRSVSSEILIKQLISAGGISNYQDYVTRNALVKHLRTHGIGGSPGTSFRIPDSEILLYTGIENSCDDNYDQASVESNSWSSEINNYDTANSPCNSKSSSVNYGARHLKFLLQSSRRRDTKEAASDLEDDVSVNSFGSRNNLEDFPIPLRQRYSKMCSLPNNKRTLSIRTYLPSPSAKKHFHAGLVQGVIKVKPQMPLPVHSTSNLFQELSISSHSSNNKQKRVDIMGPSCSNRPMDGDGTLQLSYKQGSFNKKLMNRYFSFGAHGQALEDANSCTMSNGSSKHFSSLVA

SEQ ID NO: 30062 - protein, 1028 aa, Glycine max
  unsure (1)..(1028): unsure at all Xaa locations
  Clone ID: TF_GmC6578_1.pep
MRELLLAGADPNAVDDEGESVLHRAIAKKYTDCALVILENGGCRSMAILNSKNLTPLHHCVAIWNVAVVKRWVEVATSDEIAEAIDIPSPIGTALCMAAASKKDHENEGRELVRILLAAGADPSAQDSQNGRTALHTAAMTNDVDLVKVILGAGVDVNIRNVHNSIPLHLALARGAKACVGLLLDAGADYNLKDDDGDNAFHIAAETAKMIRENLDWLIVMLMKPDADIEVRNHSGKTLRDILEALPREWLSEDLMEALVNKGVHLFPTIFKVGDWVKFKRSVTTPTHGWQGAKPKSVGFVQSVPDRDNLIVSFCSGEVHVLANEVIKVVPLDRGQHVHLKEDVKEPRFGWRGQSRDSIGTVLCVDDDGILRVGFPGASRGWKADPAEMERVEEFKVGDWVRIRPTLTSAKHGLGSVTPGSIGIVYCIRPDSSLLIELSYLPNPWHCEPEEVEHVAPFRIGDQVCVKRSVAEPRYAWGGETHHSVGRISEIENDGLLIIEIPNRPIPWQADPSDMEKVEDFKVGDWVRVKASVSSPKYGWEDVTRTSIGVIHSLEEDGDMGVAFCFRSKPFSCSVTDMEKVPPFEVGQEIHVMPSVTQPRLGWSNESPXAVGKILRIDMDGALNVRVTGRQNLWKVSPGDAERLPGFEVGDWVRSKPSLGTRPSYDWNSVGRESLAVVHSVQDSGYLELACCFRKGKWITHYTDVEKVPSFKVGQYVRFRTGLVEPRWGWRGAEPESHGVITSIHADGEVRVAFFGLPGLWRGDPSDLEIEQMFEVGEWVRLNYNANNWKSIGPGSVGVVQGIGYEGDELDRSIFVGFCGEQEKWVGPSSHLERFDKLFVGQKVRVKQYVKQPRFGWSGHTHASIGTIQAIDADGKLRIYTPAGSKTWVLDPSEVEVVEEKELCIGDWVRVKASISTPTHHWGEVSHSSIGVVHRMEDEDLWVSFCFTERLWLCKAWEMEWVRPFKVGDKVRIRDGLVTPRWGWGMETHASKGQVVGVDANGKLRIKFRWREGRPWIGDPADLALDED

SEQ ID NO: 30063 - protein, 918 aa, Glycine max
  unsure (1)..(918): unsure at all Xaa locations
  Clone ID: TF_GmC6455_1.pep
RTRGRTRGRSRKARSRNHTLANSMPAVHIRTHDMLNPLERQFLDAAEKGNRPVLEACLAKQLRKAPLNINAVDTMGRTAIEIAVDNENLEIVQLLLRQPDVRIGNALLCAIREGVYELVEVLVNHPSITRDMLGEGWAKYLDPTETATSEYSSDISPVIMAAHLNQFEILQMLLRKDANIEKPHKHYCACEMCDSERINDGLHRSLKRINKYRALASPAWISLTSSDPILSAFKLSRELQKRAKVEDEFKDQYLQLAEQCKQYACDLLSQCRSTEEVMAVLNKEDNFCNEEVDLNAAKCSLARLKLAIKYEQKTFVAHPHCQQLLTSIWYEGFPLKRHRSSSLRTLLIALLLVLGWPLMAICYIAFPKSRVGEIVRSPFMKFLYYSTSFGCFLALLTMVTFEVHREQTGEVKGGTATRAADRGPTPTLIEWLVFIWVIGMLWSEIKQMWLEGFTKYIHQWWNWLDFVMVCLYLCTISIRFSAYSIYVMHNVGEQFTPRHVIRTHWNAFEPVLVSEALFAVGNVFXTNPYLGPLQISLGCMLVDVAKFCFIFVLIISSFSIGLAQLYWYYDSQTPVCLSSDRCKIVPNAFSSIASSYMTLLWSLFSITKVEDTEVVEAHHFTVWVGRGLFILYHMTSIIVLLNMLIAMMSHSFERINDHADLEWKFHRSKLWMAHFDEGSTLPPPFNIFPTPKAFIHTCRAIINVVNWCFGRYNYMAAKEGTRATIRRPGYSKRWHDMEGGLSGAPNGAGGTEPRKPITYTEIIQRLVSRFIHEQKKSMKMDGVNEDDLLEIKQDISSLRYELRDDRRKEIVRSLSHIDAVKREIMRSMSTTTRIFGNTPRRQLSVKERSVAEEADSELGDSSATEEGGTESIRSSLPFFDSLRSATLSPHPFITIAASGDKQFQYAERDAVAEPLRYR

SEQ ID NO: 30064 - protein, 199 aa, Glycine max
  Clone ID: TF_LIB4281-018-R1-K1-C4.pep
MKMTEEVKHDQQSITKEREEYTSMDNFRGIVVEGNRDDVLAISAAEGEDFHGSVVQGNWDDVIHMCENKGMLCKIMINASRGTALHVAVSEGNEVVVNRLVESMINHNMVEALELKDEKGDTPLHLAASRGLKHICECIIGPNYERKYLITIHNEEGETPLFQAALSWQKQAFMYLSSLMPDDENYSVLNSRNGDSILH

SEQ ID NO: 30065 - protein, 144 aa, Glycine max
  Clone ID: TF_GmC1577_1.pep
MLAIGKATSVDICRFFSKPGPYVSCDTMEFLLARYDGELDVDAVDSEGRTTIHVVVREGHTRVIRFCVTMGGNPNRVDSKGWTPLYYAAWKGHVKAAECLLECSNVKCVRDREGRRTFSVVAESEHEHSVIDKVQKETKSRAGF

SEQ ID NO: 30066 - protein, 291 aa, Glycine max
  unsure (1)..(291): unsure at all Xaa locations
  Clone ID: TF_GmC1240_3.pep
RLEGHNRTEIVKFLLDWQGADKVEMEAKNMYGETPLHMAAKNGCNKAAQLLLARGAIVEARANNGMTPLHLAVWYSLRAEEFLTVKTLLEYNADCSAKDDEGMTPLNHLSQGPGTEKLRELLLWHLEEQRKQRAIEACSETKAKMDELEKQLSNIVGLNDLKVQLRKWAKGMLLDEKRRSLGLHVGRRRPPHMAFLGNPGTGKTMVAXRILGKLLHTVGILPTDKVTEVQRTDLVGEFVGHTGPKTRRKIKEAEGGILFVDEAYRLIPMQKSDDKDYGLEALEEIMSVMDS

SEQ ID NO: 30067 - protein, 160 aa, Glycine max
  Clone ID: TF_GmC311_3.pep
MKVRNKSGDSGGHGSEAKGPMGPVFSTFVYEEEYGSDSQMEAIHGFAREGDMANLLKCIENGVSMNLKDSEGRTPLHWAVDRGHLNVTELLVGKNADVNAKDNDGQTPLHYAVTCEREAIAEYLLKHNADIYSKDNDGSSPRDICESNWPCMQHVGGEVN

SEQ ID NO: 30068 - protein, 591 aa, Glycine max
  Clone ID: TF_GmC178_1.pep
MIGVKMALTHSTSFPQMFQRAASAQFRRPLLHLVSTQESRHRYLTQCVPLHKAALKGDWKEAKKILDQDPTLELNSAITKGWATVLHIAVGANHESFVEELLKLMSREDLELQDIKGNTAFCFAAAVGNVHIAERMRIKNASLPMIRGGEGVTPLHLAVLQGRSEMARYLFDKTRETLYDDDWFQLFLICVNSRLYELALEMLNQKESLAFARGDNDETALHVLARKPLDCGCRSPLRYPKHVLHLCKNMKDPPVLKLTRRVWDIFLTLDDSKMMTAIREPSQVTFIAAEVGNFEFLSVIMSTYPDLIWELNTMGQSIIHVAALHRHASIFNLIHEIGPSKDLLLTFWDDEGSTLLHSVAEIAPTDRLNVVSGAALQMMLELTWFEEVKKNMQPSYIERPNHEGIVPRELFTEKHKELLKKGESWMKRTASSCMVVSTLIATGVFSAAFSVPGGTKDDSGSPNYLKKHLFTVFAISDALALTLSTASTLIFLSILISRYAEEDFLRSLPFKLIFGLVSLFLSIVSMMGAFSSAFFITYYHAKTWVVPITIAVFVLFPILLFIYLQFRLWHDIVYSHYMCGSLFRPRKRMIH

SEQ ID NO: 30069 - protein, 350 aa, Glycine max
  Clone ID: TF_GmC42_22.pep
MASDSKKDFPADDKAGTAENKASKDETSSKDSPAAQRATTATSGPATGFPGNPFDFSAMSGLLNDPSIKELAEQIAKDPSFNQMAEQLQKTFQGAPQDAMPSFDNQQYFSTMQQVMQNPNFMTMAERLGNALMQDPSMSAMLESFSNPSNKDQLEERMTRIKEDPSLKHILEEIETGGPAAMMRYWNDEEVLRKLGQAMGLANSGDVGASAENSGADETEDLGNEDESIVHHTASVGDVEGLKNALAAGADKDEEDSEGRTALHFACGYGEVKCAQVLLEAGAKVDALDKNKNTALHYAAGYGRKECVALLLENGAAVTLQNMDGKTPIDVAKLNNQNEVLKLLEKDAFL

SEQ ID NO: 30070 - protein, 548 aa, Glycine max
  Clone ID: TF_GmC1451_1.pep
MDTPNAQPQAASASTPRKKMTKQLTGKRDDTPLHSAARAGNMTVLKDTVGGTEEGELRVLLTKQNHAGETVLYVAAEYGYVDMVRELIQYYDLAGAGIKARNGFDALHIAAKQGDLDIVKILMEAHPELSMTVDPSNTTAVHTAALQGHTEIVKLLLEAGSNLATISRSNGKTALHSAARNGHLEVVKALLGKEPSVATRTDKKGQTAIHMAVKGQSLEVVEELIKADPSTINMVDNKGNTALHIATRKGRARIIKLLLGQTETNALVVNRSGETALDTAEKTGNSEIKDILLEHGVRSAKAIKAQPGTATARELKQTVSDIKHEVHYQLEHTRQTRRGVQGIAKRINKTHAQGLNNAINSTTVVAVLIATVAFAAIFTVPGQFADEPKDIPAGSGMTIGEANIAPQAAFLIFFVFDSIALFISLAVVVVQTSVVIIESKAKKQMMAIINKLMWLACVLISVAFLALSFVVVGKDQKWLAIGVTIIGTTIMATTLGTMSYWVIRHRIEASNLRSIRKSSMGSRSRSFSVSVMSDSELLNNDRKILYAI

SEQ ID NO: 30071 - protein, 491 aa, Glycine max
  unsure (1)..(491): unsure at all Xaa locations
  Clone ID: TF_GmC611_1.pep
MGNSFGCSASGERLVSAARDGDLVEAKMLLNCNPCLAKXVALLLENGADVNSRNYCGQTALMQACRYGHWEVAQTLLLFRCNVIRADYLSGRTTFHFAAVHGHVSSIRLVVADFVPSALYQAIHAGTDVDRGGGSNAKGKHEQSALSKFINKTADGGITALHMAALNGYFDCVQLLLDLNANVNAVTYHYGTSMDLIGAGSTPLHYGACGGNLKCCQILVAHGASRLALNCNGWLPLDIARMWGRHWLEQLLAPSSDATMPTFSHSNYLSLPLMSVLNIAREYGLQSSTASSDEIDFCAVCLERPCSVAAEGCGHELCVRCALYLCSTNNVSSEMVGPPGSIPCPLCRHGVVSFVKLPGSQAKENKLHVSLGLCTPCMLHPRDLDKPSLSHTPEVGRNRVASVPSEILCPVTCSPFPSMAIPLCTCNDGPCPSFEPREVETQDGLPHHSQASTVDQDKIEGPRLDKTTCSSMFWGRRSCSREHQCNSEINA

SEQ ID NO: 30072 - protein, 143 aa, Glycine max
  Clone ID: TF_LIB5118-026-A1-PF1-G11.pep
MIDPSIRLRRAIHAADAPLVKRILKSHPSLLHNPDAAPAGQSNSNLHLAASLGHRDICEALLAAGHEDPCPALNEAHQTALMLAAAAGHVDVVHLLCDHDASCILRRDARGRDAVMEASRGGHDTILQLLLTYVPGEPHVAGQ

SEQ ID NO: 30073 - protein, 440 aa, Glycine max
  unsure (1)..(440): unsure at all Xaa locations
  Clone ID: TF_GmC1462_1.pep
RCCCGCNLSDLRFCFRIISPTKNYTLQXSALDQMDWIEKITGVIASLLSSQIPERMLPASPMGSGHHRSTSESSSFESSDXDHYAGEECAADRSFTSAHLERPSRSLQQQRSCTKSEKPIDVLRRVCGNDKCADCGAPEPDWASLNLGVLVCIECSGVHRNLGVHISKVRSLTLDVKVWEPSVISLFQSLGNTFANSVWEELLQSRSAFQVDLVPTGLSTSDKPMMFFITKPCQSDSLSVKEKFIHAKYAEKLFVRKPKDNQYCLLVAQQIWEAVHANDKKAVYRYIVNSDVDVNAVYEPTCSSSLTLAKVMLLQEQTSHDHGSTLAGNTLDWSSTKEGQVMDNLEGCTLLHLACETADIGMVYGCEKTTANVNASDSRGQTPLHRCILKGRSTFARLLLSRGADPRAVDEQGRTPIELAAESNAGGDREVHAPLTDSSG

SEQ ID NO: 30074 - protein, 181 aa, Glycine max
  Clone ID: TF_GmC156986_1.pep
MCGVSKGKPSQIDLIMEEKYAKEGMHHKISALLEFSATDDLIGFKDAVEKEGHDVDGVGFWYGRRVGSKKIGYEERTPLMVASMFGSLDVSTYILGMGCIDVNRASRSDGATALHCAVAGGSAASVEVVKLLLDASGDVSAVDANGNRSIDLIVSVANSIFNQRSSVLQALLGGTSDADQA

SEQ ID NO: 30075 - protein, 158 aa, Glycine max
  Clone ID: TF_GmC797_5.pep
CGRVGGRVGGRVGVDVSSMFIVRKNGKTSLHNAARYGVHRIVKTLIARDPGIVCIKDKKGQTALHMAVKGQCTSVVEEILLADPSILNERDKKGNTALHMATRKCRSQIVGLLLSYSAVDVNAINKQQETALDLADKLPYGDSALEIKEALAEYGAKH

SEQ ID NO: 30076 - protein, 142 aa, Glycine max
  unsure (1)..(142): unsure at all Xaa locations
  Clone ID: TF_GmC16_2.pep
MGQSLSCSGNHDHGLFTAVLHGDLQIVTTLLDSDPSLLHQTTLYDRHSPLHIAAANGQIEILSRLLDGSLNPDVLNRHKQTPLMLAAMHGNIACVEKLLQAGANVLMFDTIYGRTCLHYSAYYXHSSCLKAILSAAQSNPVA

SEQ ID NO: 30077 - protein, 447 aa, Glycine max
  unsure (1)..(447): unsure at all Xaa locations
  Clone ID: TF_GmC130201_1.pep
MGQGLSCRGSHEHGLFRAVQHGDLDTVAALLQTHPSLMNHTTVYDHHSPLHIAAANGQIQVLSWLLDGSVNPDVLNRQKQTPLMLAAMHGKIACVEKLLEAGANVLMFDACYGRTCLHYAAYYGHSSCLKAILSAAQSSPVAASWGFARFVNIRDGRGATPLHLAARQRRPECVHILLYSGALVSASTGRYGCPGSTPLHLAAKXGSLDCIRELLAWGADRLQRDASGRIPYVVALKHRHGACAALLNLSSAEPLVWPSSLKIISELNPDAKELLERALMDANREREKNILKGSDYSLPSPSHSDGVDDNISEVSETELCCICFEQVCTIEVQDCGHQMCAQCTLALCCHNKPNPCTSRVIPPVCPFCRSTIARLVVVKKESPDDIDQDGVDITCSKHSKSRKSRNSNEGGSSSIKGLSNVNSFGKMGGRSSGKIAAENEWEDDKQQ

SEQ ID NO: 30078 - protein, 549 aa, Glycine max
  unsure (1)..(549): unsure at all Xaa locations
  Clone ID: TF_GmC6679_1.pep
SPRVGANKCAPIYSLAIRGEWKETEAMIDADRRLATSAISQGRATLLHVAAEANQLHFVKELVKLLSDEDLELQDRKGNTAFCLAAASGNVRIVKVMARRNSRLPTIRRGDGLTPLHMAALQGKNKMAWHLYHDTVQTFNDADWDALFFFCLKTDIYDLALKVLREKPRVALARNENQETGLHVLARKPSSFSCRXGLGQRFLYMLTNSGKSPTLALQLVKCLWETLLSLDGTEMQTIIKVISEPSQVIFIATEVGNFEVLAELVRSCPELMWEVDTKNRSIIHIAALHRHIDIYNLIHETSSIRNFVVTLEDEDKNNLLHYAAKLSPPSKLNLLPGPVLQMKFELMWYEEVKKIMQPCFIEMRNSNGKTPRELFTEEHLELVTKAESWMKSMINSCITISTVTATLVLATAFSIKREDNHKPTITRDFMLYIGIAMISSSISSLIFLSILITSPCVEEDFLKSLLRKIWWGLVTLYTSIAYLSTTFTIAFFTTYQVRVPKSFFWGPLISLLIMEYLLFPYGSLVNINPRYWLPSKYIFYTGKAKGRVN

SEQ ID NO: 30079 - protein, 243 aa, Glycine max
  unsure (1)..(243): unsure at all Xaa locations
  Clone ID: TF_GmC334_1.pep
MEMEVDIEKKQQDVVKEKDLFKAAEEGEASTFEALSSEILSKALSLRNEDARSLLHVAASSGHSQVVKIVLSCDASAGVVNCADEEGWAPLHSAASIGSVEIVETLLSKGADVNLKNNGGRAALHYAASKGWVKIAELLISHDPTITIKYYLXSTPLHRVARTGKSELCELLIAEREEVHAVDSAGHTPLMNTAICCKKQVAQLVIIHGADADLEDKEGYTVLGRATHEFRPILIDAAKAMLE

SEQ ID NO: 30080 - protein, 336 aa, Glycine max
  Clone ID: TF_GmC114164_1.pep
MMRLTMLLMHKNSAAGASLASQSEDSQKSLRDGIYSKEVVSVSKILRGIPGNDKCAECSAPDPDWASLNLGILLCIECSGVHRNLGVHVSKVRSITLDVRVWENTVLELFDNLGNAYCNSVWEGLLLLDHERLGESNVPMKPCSTDAFQHKEKYIQAKYVEKSLIIREEDIPGNPSVSIRIWQAVQAVNVREVYRLIVTSTSNLINTKYYDESHHAADAKGHQHDPEACLRVEETTETERCFRGWSLLHLACHSGSALMVELLLQFGADVNMCDYHERTPLHHCITSGKNQLAKFLLRRGARPSVKDAGGLTVLERAMERGAITDEELFILLAECQ

SEQ ID NO: 30081 - protein, 169 aa, Glycine max
  Clone ID: TF_LIB4164-037-R1-N1-H11.pep
EEDIPENPSVSIRIWQAVQAVNVREVYRLIATSTSNLINTKYYDEAHHAADAKGHQHGPEACLKVEETTETERCFRGWSLLHLACHSGSALMVELLLQFGADVNMCDYHERTPLHHCITSGKNQLAKFLLRRGARPSVKDAGGLTVLERAMERGAITDEELFILLAECQ

SEQ ID NO: 30082 - protein, 204 aa, Glycine max
  Clone ID: TF_GmC150_1.pep
MAVPGRRNGINDDEEELDDNALFEEQGVVEDDTDTPPHLRDLSAAAQIGDAHALRLALDNLTGSIDEPVEDGDTALHLTCLYGHLACVQLLIERGANIEAKDEEGAIPLHDACAGGFTEIVQLLLNRANDAEHIKRMLESVDSEGDTPLHHAARGEHIDVIRLLLSNGASPTKANLYGKAPADLPEQEDARRLLEAAALAMACQ

SEQ ID NO: 30083 - protein, 329 aa, Glycine max
  unsure (1)..(329): unsure at all Xaa locations
  Clone ID: TF_GmC1340_1.pep
MKEADEQLCEAAIKGDTKKVRSLIYSGADVTHFDGDGLNPLMHAAKHGHAPVLTLLLSVGAPWNALSPSNLSAGDYAMQEGHNETFELLLNAGIQSELILGTIARKANKNGDSGHDYLEDRVSFSEDKLMDSESKAVMMAWENPLMEAHAKAVCSGGGHVLNIGFGMGLVDXALQRYAPASHTIVEAHPGVYERMLRSGWGXKENVKIVFGRWQXDVLPQLETYDGIFFDTYGEYYEDLREFHQHLPALLKTGGIYSFFNGLCGSNAFFHVVYCHLVSLELENLGYSTQLIPLPVKDCLGEQVWEGVKQRYWQLDTYYLPVCQAIENPE

SEQ ID NO: 30084 - protein, 571 aa, Glycine max
  Clone ID: TF_GmC557_1.pep
MVLVITTCLPPPAKMHDENIEILSLNKLSGSLEKLLIEAEYDYCDAEILVEDIPVGIHRCILASRSQFFHELFKKGTDGSGKEGKPRYLMSDLMPYGTVGYQAFQVFLYYLYTGRLKASPTEETTCVDETCIHVACRPAINHALELMYASATFQMKELVLLFQRHLLNFVEKALVEDVIPILMAAFNCQLDQLLSRCIQRVARSDFDNTSLEKELPREVVTEIKLLRLPFQPESTPNAMEVESLNEKSIRRIHKALDSDDVELLKLLLNESSVTLDDAHALHYACAYSDSKVIQEVLSLGMADILRRNSRGYTVLHVAARRKDPSILVALLNKGACASDTTPDGQTALAICQRLTRYKDYQEQTVQCKESNKDRLCVDVLEREMRRNSMTVNMSVSSQLTADDLHMRLDYLEDRVAFARLLFPAEARVAIENAEADSSSLYANSSALKVTNGNPKEVDLNESPSARTRKLQLRLHALMKTVENGRRFFPHCSEVLDKFLEDDEMPDVFFLEKGSEEEQRIKKARFMELKDDVQKAFHKDMAENNHSGFSSTVSSSSSSTRREGLNHRVRRK

SEQ ID NO: 30085 - protein, 506 aa, Glycine max
  unsure (1)..(506): unsure at all Xaa locations
  Clone ID: TF_GmC611_3.pep
MGNSFGCSASGERLVSAARDGDLVEAKMLLNCNPCLAKYSTFGGLNSPLHFAAAKGHNEIVALLLENGADVNSRNYCGQTALMQACRYGHWEVAQTLLLFRCNVIRADYLSGRSALHFAAVHGHVRCIRLVVADFVPSAPYQAIHAGTAVDRGGGSNCSALSKFVNKTADGGITALHMAALNGYFDCVQLLLDLNANVNAVTYNYGTSMDLIGAGSTPLHYAACGGNLKCCQILVAHGASRLALNCNGWLPLDIARMWGRHWLEQLLAPSSDATMPTFSHSNYLSLPLMSVLNIAREYGLQSSTASSDEIDFCAVCLERPCSVAAEGCXHELCVRCALYLCSTNNVSSEMVGPPGSIPCPLCRHGVVSFVKLPGSQAKENKLHVSLGLCTPCMLHPRDLDKPSLSHTPEVGRNRVASVPSEILCPVTCSPFPSMAIPLCTCNDGPCPSFEPREVETQDGLPHHSQASTVDQDKIEGPRLDKTTCSSMFWGRRSCSREHQCNSEINA

SEQ ID NO: 30086 - protein, 232 aa, Glycine max
  Clone ID: TF_GmC61596_1.pep
MVGDFQVTMEKQSSFRASTMEKQKSFRGFMEKQKSFRIVMEKQLSFMGSERKKNKESPGKRGDLPIHLAARAGNLSRVKEIIQNYSNNETKDLLAKQNLEGETPLYVASENGHALVVSEILNYLDLQTASIAARNGYDPFHIAAKQGHLDSFVLRELLHSFPNLAMTTDLSNSTALHTAATQGHIDVVNLLLESDSNLAKIARNNGKTVLHSAARMGHLEVVKALLKDRTLD

SEQ ID NO: 30087 - protein, 186 aa, Glycine max
  unsure (1)..(186): unsure at all Xaa locations
  Clone ID: TF_GmC4222_4.pep
MESKNPARFTLGKQSSLAPERHNKEAELQKDGEAVDQGVRLMYSAFEGDVDGIREALESGVSVNYKDIDNRTALHVAACEGFTDVVDLLLQKGAEVDPKDRWGSTPLADAIFYKKXDVIKLLEKHGAKPLMAPMHVNHAREVPEYEINPKELDFTNSVEITKGTFCSALXGRGTKGAVKKLGXDVI

SEQ ID NO: 30088 - protein, 110 aa, Glycine max
  unsure (1)..(110): unsure at all Xaa locations
  Clone ID: TF_LIB3107-079-F6-R1A.pep
MPYVEGSVLVRILLAAGAGSSAQGSQDGWSALHTAAMADDVDLVRVIXGAGVDVSIRGVQISIPLHLALARGAKACVGRLLDAGAEYCLRDDDGDNAFHIAAVSASVLSR

SEQ ID NO: 30089 - protein, 196 aa, Glycine max
  unsure (1)..(196): unsure at all Xaa locations
  Clone ID: TF_GmC1577_2.pep
MDVTAIATAESIMPLTIRVGNLHTMKLLEAFDCKIDGLFLHEATTMVRIDAMEFLLARYDDELEVDVVDSEGRKTIHVAAREGHARVIXVLRRDGGNPNRVDSKGWTPLHYAAWKGHVKAAECLLECSNVKCARDREGRTAFSVAAESEHEQSHARTRLVDLLGWGDALLRAVRVDDVHGVKKCLGEGVSVNGRDQ

SEQ ID NO: 30090 - protein, 470 aa, Glycine max
  Clone ID: TF_GmC643_1.pep
MEVVVTPTLENDTITTLYEASLNGSVSTLNTLIQRNPLILHRVSLSPFSETPLHIASLLGHLEFCEALLKRKPSLASEVDSERRSPLHLACAEGHTEVVKALLHTNPDVCLAMDKDEMLPLHLAVMRGHTGVIKELTRARPGSIQQNTIDDGSVLHLCVRYNHLEALIFLVQSATRNQQQFLLAKDKEGDTVLHLAVRLKQIKTIKHLLMLPEMRTAISALNKAGLTALEMLERCPRDFISLKIEKMLLEAEVQTGTAQQGSPSPRIATQPSNQSKRSKIWETLWLKYLQYQSNWIEEKRGTLMVVATVIATMTFQSAISPPGGVWQEDTITGGHNCTTYGICKAGTAVLAYDWPHGFLKFMTFNTTSFFSSLAVVLLLISGFRLENKLMMWILTMGMTLALTFMGLTYFWAQSLVTPDHIVDKVNRMGIPLSIVWVIMLLVAVLVHGVNLFLWVKKYVKKWKKQKLLQS

SEQ ID NO: 30091 - protein, 512 aa, Glycine max
  Clone ID: TF_GmC611_2.pep
MGNSFGCSASGERLVSAARDGDLVEAQMLLNCNPCLAKYSTFGGLNSPLHFAAAKGHNEIVALLLENGADVNSRNYCGQTALMQACRYGHWEVVQTLLLFRCNVMRADYLSGRTALHFAAVHGHVRCIRLVVADFVPSALYQAIHAGTDVDRGGGSNAKGKHEQSALSKFINKTADGGITALHMAALNGYFDCVQLLLDLNANVNAVTYHYGTSMDLIGAGSTPLHYGACGGNLKCCQILVARGASRLALNCNGWLPLDIARMWGRHWLEQLLAPSSDASIPTFSHSNYLSLPLMSVLNIAREYGLQSSPTSSDEIDFCAVCLERPCSVAAEGCGHELCVRCALYLCSTNNVSSEMLGPPGSIPCPLCRHGVVSFVKLPGSQAKENKLHVSLGLCTPCILHPRDLDQPSLSHTPEIGRNRVASVPSEIRCPVTCSPFPSMAIPLCTCNDGPCPSFEPGEVETQDGSPHHSQASTVDQDKIEGPRLDKTTCSSMFWGRRSCSREHQCNSEINA

SEQ ID NO: 30092 - protein, 126 aa, Glycine max
  Clone ID: TF_LIB3242-391-P1-J1-F2.pep
KDSSTINEVGLWYGRQNGSKQFVLEHRTPLMVAATYGSIDVMKMVLLCPEADVNFACGANKTTALHCAASGGSTKAVDAVKLLLSAGADVNCVDANGNRPIDVIAVPPKLQGAKAVLEELFFGQCF

SEQ ID NO: 30093 - protein, 203 aa, Glycine max
  unsure (1)..(203): unsure at all Xaa locations
  Clone ID: TF_LIB4167-006-Q1-K1-B6.pep
MGNSFGCSASGERLVSAARDGDLVEAQMLLNCNPCLAKYSTFGGLNSPLHFAAAKGHNEIVALLLENGADVNSRNYCGQTALMQACRYGHWEVVQTLLLFRCNVMRADYLSGRTALHFAAVHGHVRCIRLVVADFVPSXFIKLYMLAQMLTXVGGSNAKGKHEQSALSKFIXXTADGGITALSYAALNGYFDCVQLLLDLMQM

SEQ ID NO: 30094 - protein, 172 aa, Glycine max
  Clone ID: TF_GmC1249_1.pep
MLEEQPVVLFRKSPSRRRLRSAFDTDDRGWTSLHVFARKGELKLVKKLINEGMDVNVSAWGPKSKGVTPLHLAAEGGHIGVMDVLLERGADIDARTKGACGWTPLHIAAKERRRDAVKFLLENGAFMPPDISDSRFNPPLHYCPGLEWAYEEMKRLRQEDLSAGETSYSSES

SEQ ID NO: 30095 - protein, 164 aa, Glycine max
  Clone ID: TF_GmC140986_1.pep
CLQFKPSKRPTFSAMLAIFLRHLQEIPRSPPASPDNGLDKGSVSNVMEPSPVPELEVPQENPNHLHRLVSEGDTAGVRDLLAKAASESGSNYLSMLLEAQNADGQTALHLACRRGSAELVETILECREANVDVLDKDGDPPLVFALAAGSPECVRSLIKRNANV

SEQ ID NO: 30096 - protein, 334 aa, Glycine max
  unsure (1)..(334): unsure at all Xaa locations
  Clone ID: TF_GmC798_2.pep
RSGSRLKYLLSRGVNPDLESDSGTPLVWAAGHAQPASVSVLLEHGANPNAETDDGITPLLSAVAASSLACLELLIQAGAKVNISAGGATPLHIAADNGSLELLNCLLKAGADPNVSDEDGVKPIQVGAARGYLKAVEILFPLTSKVDTIPTWTADGILEYMQSETRKQLDESINDQETNHPKEADFPKQNVPEVAPEAQMRAXAESKSRGDEAFKRYDYHMAIDSYTQAIDLNPTDATLLSNRSLCWIKLGQAEHALADAKACRALRPDWPKACYREGAALRLLQKFDEAANAFYEGVKLDPENKELVNAFREAVEAGRKFHGTRENMLLIPRS

SEQ ID NO: 30097 - protein, 261 aa, Glycine max
  Clone ID: TF_GmC555_3.pep
SSEIEVVEEVQSRDEQSAASGGGGDGMGAEESLRNDVYTAASYGDLEKLQRLVEQEGCPVTEPDGLGYYALQWAALNNRTAAAQYIIEHGGDVNATDHTGQTALHWSAVRGAIQVAELLLQEGARVSAADMNGYQTTHVAAQYGQTAFLYHIVSKWNADPDVPDNDGRSPLHWAAYKGFADSIRLLLFLDAHRGRQDKEGCTPLHWAAIRGNLEASTVLVQAGKKEDLMVTDNTGLTPAQLASDKNHRQVAFFLGNARRLL

SEQ ID NO: 30098 - protein, 63 aa, Glycine max
  Clone ID: TF_GmC27269_3.pep
GLSLLHLAAVFNQTDIVFILMDSGASLEYRNAQGETPLDCAPATLQYKMRKKMEEGGAVDQSI

SEQ ID NO: 30099 - protein, 85 aa, Glycine max
  Clone ID: TF_LIB3242-492-P2-K1-B6.pep
RGHQQLLKILLDNGADIDIQDEAGQTPLHYAAITDNIDIYKTLIRHRADPSVRDSDGNTPLDVASAETRDAIHEMSQSEPQPKGG

SEQ ID NO: 30100 - protein, 594 aa, Glycine max
  unsure (1)..(594): unsure at all Xaa locations
  Clone ID: TF_GmC555_1.pep
MSSEIEVVEEVQSRDEQSGAEESLRNDVYTAAAYGDLERLQRLVEQEGCPVSEPDGLGYYALQWAALNNRTAAAQYIIEHGGDVNATDHTGQTALHWSAVRGAIQAAELLLQEGAXSAADMNGYQTTHVAAQYGQTAFLYHIVSKWNADPDVPDNDGRSPLHWAAXKGFADSIRLLLFLDAHRGPQDTGGSNPIHXAGSLGNSXACSVQEQAGDYSEEGIGMMHMARSSNLANGDSHNHSEYARGNGNGHHVINVNSNSNRPNLLSTMRPWVLGVGLGMFYRCCQQXDPGYFRMNKHDYHETKDDDTLLKIDINNLALLAGNWSQLCATCKIVRPLRAKHCSTCDRCVEQFDHHCPWVSNCIGKKNKWDFFVFIVLEVLAMLVTGGVCLTRVXTDPLAPHSFGAWIQYVANNHIGAISFLIADFFLFFGVFTLTVVQASQISRNITTNEMANAMRYSYLRGPGGRFRNPYDHGIKKNCSDFLINGYNEDVECIEELGNSEEGIGMMHMARSSNLANGDSHTHTEYARGNGNGHHAINVDSNSNSTNSKIHHGHINGHVHSSHCSHNNHGKTRNDNVPLGLGLGLGRNRSVTASS

SEQ ID NO: 30101 - protein, 383 aa, Glycine max
  unsure (1)..(383): unsure at all Xaa locations
  Clone ID: TF_GmC125239_1.pep
ENTITLHTYSSFGQVSFFCNKPQTSMVEAHEFCKVLRLDKKSFTEILKIYFLDGRIVLNNLLEVKDLSLQRKLLESDFNLTIGNMETELAIRMNFAAHDGHLDLVKRLIGFGADPNKTDYDGRTPLHISASKGYVDISSYLVEQGVNINCADKFGTTPLLECIKNGHXEVASILVNAGAIFTIDDVGNFLCMTVARLLSGLFRRVLGRGVHPFPKNYDQRTPLHIAASEGLFTMAEVLLEAGASVLSKDRWGNTPLHEAHTGGDRNMIKMLEVAKASQLVELSNNIHETQGIYLMFATPTDEGSRKRCIVFPFHPWDDQKADRKEGVVLTVPQSIEELIKEATKHLEIPNASCILSEQCGKIVYVGTINNDEKLFLVSEAQNE

SEQ ID NO: 30102 - protein, 140 aa, Glycine max
  unsure (1)..(140): unsure at all Xaa locations
  Clone ID: TF_uC-gmroLIB3258P143a05b1.pep
MKFLSLVGNSFGCSASGERLVSAARDGDVQEAKALLEYNPRLARXVYLLLESGVDINLRNYRGQTALMQACQHGHWEVVQTLVIFNANIHKADYLNGGTALHLAALNGHTRCIRLILADYIPSVPNFWNALQTGDHKSIS

SEQ ID NO: 30103 - protein, 475 aa, Glycine max
  Clone ID: TF_GmC37725_1.pep
MESIAAQLKRGISRQFSSGSLRRNLSWQFTRQASLDPRRNNQRFSFGRQSSLDPIRRSPCSGNAELTVPENLDSTMQLLFMACRGDVKGVEDLLNEGIDVNSIDLDGRTALHVAACEGHVEVARLLLSRKANLDARDRWGSTAAADAKYYGNTEIYYMLKARGAKVPKTRKTPMTVANPREVPEYELNPVELQVRKSDGISKGTYQVAKWNGTKVAVKILDKDSYSDPDTINAFKHELTLLERVRHPNVVQFVGAVTQNIPMMIVREYHSKGDLASYLQKKGRLSPSKVLRFALDIARGMNYLHECKPDPVIHCDLKPKNILLDNGGQLKIAGFGTVRFSLISPDEAKLVQPEPNIDLSSLYVAPEIYKDEVFDRSVDAYSFGLIIYEMIEGTHPFHPKSSEEAVRLMCLEGKRPAFKIKTKHYPPELKELIEECWDPTPVVRPTFSQVIARLDKIVANCSKQGWWKDTFKLPWK

SEQ ID NO: 30104 - protein, 423 aa, Glycine max
  unsure (1)..(423): unsure at all Xaa locations
  Clone ID: TF_GmC6794_1.pep
TNRNFCTVLAIDNKIQEELFIPGGVIMDQRNVVDQLYFVGHGVLEEVATSEHGTAXTVSLLQPNSSLAEISILCYILXPYTDRVCXLSTLLRLYKQSFTNILDIYFYDGRKVLNNLLEGKESFLDKQLESVITFHIGKQEAELAXLKVNSAAFNGDMYQLKXLIRAGADPNKADYDGRSPLHLAASRGYEDITIFLIQERVDVNIIDNFGNTPLLEAVKNGHDRVASLLVKEGASMKIENAGSFLCTAVARGDSDYLKRLLSNGMDPNLKDYDYRSPLHVAAAEGLYFMAKLLLEAGASVFTRDRWGNTPLDEARMCGNKNLIKLLEDAKSSQLSEFPSQEFTDKMHPKKCTVFPFHPWDPKDNRRHGIVLWIPHSIEELIKSAAEQIEISGGSCILSEDAGKITDVDMIKDGQKLYLVHETH

SEQ ID NO: 30105 - protein, 291 aa, Glycine max
  Clone ID: TF_GmC262_1.pep
MARVRIDVDFPSPDAASQVGLLHKEIVGKAMIYKLSEAVEEGDGANFVKVLKQQCEENKLRLSDVFDKVTLAGHSLLHVAADMGQKSIVQVLCDLFPLLLIRRNVRGDTPLHVAARSKKYETVKLILSQYATKKSTYDEMKDKKITRETNECGNTPLHEAVYSGDVDVVKENFDQDKAVAYCLNKSKRSPLCLAVVNGNEQILELLLQIPLPADQPLSQCRRSSPLHTAVQHLELLLQIPLPADQPLSQCRRSSPLHTAIQHQKRVMILAIIEIRPELVYLRDEDGNTPLS

SEQ ID NO: 30106 - protein, 643 aa, Glycine max
  Clone ID: TF_GmC201_1.pep
RGSGFPGRPTRPRSGRTRGRTRGVNFACGANKTTALHCAASGASTKAVDAVKLLLSAGADVNCVDANGNRPIDVIAVPPKLQGAKAVLEELLSDNASDVSVGEFSVPVSVNSSSPGSPAHSSNGMPYTPSVSPPSPVAAKFTDAAICSLSEKAREYPIDPSLPDIKNSIYATDEFRMFSFKVRPCSRAYSHDWTECPFVHPGENARRRDPRKFHYSCVPCPDFRKGACRRGDMCEYAHGVFECWLHPAQYRTRLCKDGTSCNRRVCFFAHTAEELRPLYVSTGSAAPSPRSSASGPNVMDMAAAMSLFPGSPSSGSSISLSISFSLDPMSPSANGMPLSSAWAQPNVPALHLPGSNLQSSRLRSSLSARDIPPEDLNMMSDLDGQQQHHLNDLSCYIQPRPGASSVSRSGRSKTLTPSNLEELFSAEISLSPRYSDPAAGSVFSPTHKSAVLNQFQQLQSMLSPINTNLLSPKNVEHPLFQASFGVSPSGRMSPRSVEPISPMSARLSAFAQREKQQQQLRSVSSRDLGANSPASLVGSPANPWSKWGSPIGKADWSVNGDSLGRQMRRSSSFERKNNGEEPDLSWVQSLVKESPPEMIKEKFASPMPTASADGPNSNSQIESIDHSVLGAWLEQMQLDQLVV

SEQ ID NO: 30107 - protein, 541 aa, Glycine max
  Clone ID: TF_GmC58601_1.pep
MASSEIEVVSSSSSVSKPNNDQPPILDVFTASAHGDFNKLRTFVEQDGASVSLPDFSGYYALQWASLNNFHDIAHYLIQHGADVNAKDNMQQTALHWAAVHGSTLAADVLVENGARVEAADVNGYRAVHVAAQFGQTAFLNHIVVKYHADFDVPDNDGWSPLHWAAYKGFADTIRLLLFRDASQGRQDKDGCTPLHWAALRGNAEACTVLVHAGTKEELMVKDNSGNTPVQLAYDKGHRHVAPFLSNQQRASRNYWKGKLCSGIVTDIGYAPILFCTIIFLSILFINSVVAAPNLKKITAVVGLWAWTALSSAVGSLIMFYKCSSKDPGYIKRPGDLGTQSDTEDPLLNIDLNSSSVWMGNWSQLCPTCKIIRPVRSKHCPTCKRCVEQFDHHCPWISNCVGKRNKRDFFIFICLGTLTSSLSGAVAVQRIWTSKPALLAGETWIHYALVRHLGLVVFLVMDAVVFVATTTLTITQASMIARNVTTNELANSSRYDYLRGPDGRFRNPYNHGCWKNCADFFFLGYTNDDEIAWPPLQQVAT

SEQ ID NO: 30108 - protein, 453 aa, Glycine max
  unsure (1)..(453): unsure at all Xaa locations
  Clone ID: TF_GmC84_1.pep
IGNSQIGVSEILSCRNRSSIRVQVRRRKAMSSGSSSSHSSEKEKEKQRVSRTSLILWHAHQNDAAAVRKLLQEDPSLVKARDYDNRTPLHVASLHGWIDVATCLIEFGADVNAQDRWKNTPLADAEGAKKSNVIELLQSHGGLSFGQNGSHFEPKPVAPPLPNKCDWEVEPTELDFSNSVRIGKGSFGEILKAHWRGTPVAVKRILPSLSEDRLVIQDFRHEVNLLVKLRHPNIVQFLGAVTDRKPLHVITEYLRGGDLHQYLKEKGALSPATAINFSMDIVRGMAYLHNEPNVIIHRDLKPRNVLLVNSSADHLKVGDFGXLSKLITVQSSHDVYKMTGETGSYRYMAPEVFKHRRYDKKVDVYSFAMILYEMLEGEPPFASREPYEGAKYAAEGHRPHFRAKGYTPELQELTEQCWAHDMSQRPSFIEILKRLEKIKENLPTENHWHLFTS

SEQ ID NO: 30109 - protein, 127 aa, Glycine max
  Clone ID: TF_GmC84_6.pep
MSSGSSHSSEKEKEKQRVSRTSLILWHAHQNDAGSVRKLLQEDPSLVKARDYDNRTPLHVASLHGWIDVATCLIEFGADVNAQDRWKNTPLADAERAKKSNVIELLQSHGRLSFGQNGSHFEPKPVA

SEQ ID NO: 30110 - protein, 441 aa, Glycine max
  unsure (1)..(441): unsure at all Xaa locations
  Clone ID: TF_GmC201_3.pep
AFRSTVREKFHYSCVPCPDFRKGACRRGDMCEYAHGVFECWLHPAQYRTRLCKDGTSCNRRVCFFAHTAEELRPLYVSTGSAVPSPRSSASAPNVMDMAAAMSLLPGSPSSVXSMSPSPFGQPMSPSTNGISHSSNAWPQPNVPALHLPGSNIQTSRLRSSLSARDMPPEDLDVLQDFDGQQHLLNDLGCFSQPRPGAISVSRSGRSKTLTPSNLDELFSAEISSSPRYSDPAAGSVFSPTHKSAVLNQFQQLQSMLSPINTNLLSPKNVEHPLLQASFGVSPSGRMSPRSVEPISPMSSRISAFAQREKQQQQQQQLRSLSSRDLGANSPASLVGSPANPWSKWGSPNGKADWSVNGDTLGRQMRRSSSFELKNNGEEPDLSWVQSLVKESPPEMIKEKFASPMPTASADGPNSNSQIESIDHSVLGAWLEQMQLDQLVV

SEQ ID NO: 30111 - protein, 301 aa, Glycine max
  unsure (1)..(301): unsure at all Xaa locations
  Clone ID: TF_GmC770_2.pep
MASHSNQPGPGAEGQGEKDPFCEISPSPSPSSATAPALVLSNSGKRIDQAGKKKYVKQVTGRHNDTELHLAAQRGDVGAVRQILEDVDSQIMRTLSGGDDDVDLNAEIAEVRACLVNEENEPGETPLFTAAXKGHLDVVKELLNYSNAQTVSKKNRSGFDPLHIAASQGHHSIVQVLLDYKSXLSKTIGPSNSTPLITAATRGHTEVVNELLSKDCSLLEIARSNGKNALHLAARQGHVEIVKALLSKDPQLARRTDKKGQTALHMAVKGQSCDVVKLLLEADAAIVMLPLGLNKLYLLLL

SEQ ID NO: 30112 - protein, 204 aa, Glycine max
  Clone ID: TF_GmC150_2.pep
MAVPGRRNGMNDDEEELDDNALFEEQGAVEDDADTPPHLRDLSAAAQLGDVHALRIALDNLTGSIDEPVEDGDTALHLTCLYGHLACVQLLLERGANIEANDEDGAIPLHDACAGGFTEIVQLLLSRANDAEHIKRMLESVDSEGDTPLHHAARGEHVEVIRLLLSNGASPTKANLYGKAPADLPEQEAARRLLEAAALAMACQ

SEQ ID NO: 30113 - protein, 326 aa, Glycine max
  Clone ID: TF_GmC6697_1.pep
MVFFFPLKINCQVLSMLLDRNMNVDIVNHNNQTPLMYAAKQGKIDCVKKLIQAGANVFMIDSVHGGGCLHDAASHGHVDCLKAILFAAHFTAFEDSRGYLRFVDSRDFNGFAPLHLAALKGQSECVDALLDNDAILCARTSNCGGTALHLAARSGSLDCIRILLARGADRLQFDYHGNTPYTIALEHGQEECAALLGSTSGSSLVWPNHLRFIRELDKKTKALLEKALVELNKERQKAKNKPRSSRNSERNNNNIASMAGKKELCSICYDRVCTFVVRPCGHEMCAHCIMRLCQKKSDIDAPRSSNSKPVCPFCRGDIVRLLAKTK

SEQ ID NO: 30114 - protein, 120 aa, Glycine max
  Clone ID: TF_jC-gmX3055013C01sg22N19b1.pep
MKSTHDVMKKEITREKDDLGDTPLHEAVNNGDLSVLQVILHRDKDMVHELNKSRCSPLFLAAASGNVAIVNLLLDIPFSADQKLPLCFGNSPLHAAILKRNPGIPSNSHQITSLIFFPAH

SEQ ID NO: 30115 - protein, 343 aa, Glycine max
  unsure (1)..(343): unsure at all Xaa locations
  Clone ID: TF_GmC157145_1.pep
MEALVEVCEPAEVRIEFALNCKCRATVRIRSLTQTTPVAFKIQTSSPNKFLVNPPSGLIQPLSSATFQVILKPQSHLPHSYPRSPSDRFLVKTAEFCANSQSTRGSPSAPTGXTLDIKLKVAFVGPILLNDAVTRGDLDAVRNLIKRQRSMLAELSPTQAETLLGAATKLLNPDDMVHLLLEAGLRIIPNPNNAPDQVHVADTNTNINEGEEIFEASRNGHVAEVESLLRRCGGSVKYRDQYGLTAVHAAAFKGHKDVLMVLSELSDLDLECEDREGHVPLHMAVESGDVGTVKVLVEKGVNLNAVNKRGATPLYMAKIWGYDDICQLLVSRGALYSLTSTSG

SEQ ID NO: 30116 - protein, 427 aa, Glycine max
  Clone ID: TF_GmC84_3.pep
MSSGGGSSEAAAAAKEKEKEKARVSRTSLILWHAHQDDAAAVRKLLEEDPSLVKARDYDSRTPLHVASLHGWVEVANCLIEFGADVNAQDRWKNTPLADAEGAKRTAMIELLKSHGGLSYGQNGSHFEPSPVLPPLPNKCDWEVDPSELDFSNSVCIGKGSFGEILKAHWRGTPVAAKRILPSLSDDRLVIQDFRQEVNLLVKLRHPNVVQFLGAVTDRKPLMLITEYLRGGDLHKYLKDKGALSPSTAINFGLDIARGMAYLHNEPNVIIHRDLKPRNVLLVNSSADHLKVGDFGLSKLIKVQSAHDVYKMTGETGSYRYMAPEVLKHRRYDKKVDVFSFAMILYEMLEGEPPFSNYEPYDGAKYVAEGHRPSFRGKGYIPELRELTEQCWDADMKQRPSFIEIIKHLEKIKENLPSDHHWHLFTS

SEQ ID NO: 30117 - protein, 170 aa, Glycine max
  Clone ID: TF_GmC411556_1.pep
MDLDHLKGPFDDDPSWKERCNKRMEELKNTQFSSQDAASQQELLHKELVGEKIVLIPELYKAVEEGNVNKFLDVLEQECKQRKLNLSVIFEQVTETGDSLLHVAADKGKEKIVELICCHFPELLIRRNVRGGTPLHVAVRSKNSTMVNLILSQYASMKSTHDVMNDTEIS

SEQ ID NO: 30118 - protein, 172 aa, Glycine max
  unsure (1)..(172): unsure at all Xaa locations
  Clone ID: TF_GmC611_6.pep
MGNSFGCSASGERLVSAARDGDLVEAKMLLNCNPCLAKYSTFGGLNSPLHFAAAKGHNEIVALLLENGADVNSRNYCGQTALMQACRYGHWEVAQTLLLFRCNVIRADYLSGRTALHFAAVHGHVRCIRLVVADFVPSAPYQAIHXAQLLTGGGGSNVKGKHEHSALSKFVN

SEQ ID NO: 30119 - protein, 221 aa, Glycine max
  Clone ID: TF_GmC311_1.pep
GISYVLLLNIVCKLANKLTSFPVSSPFRRHAWQKLRAMPPEDAMQKYIDIVTEIYPTWLDGSSLRNKSGDSGGHGSEAKGPMGPVFSTFVYEEEYGSDSQMEAIHGFAREGDMANLLKCIENGVSMNLKDSEGRTPLHWAVDRGHLNVTELLVGKNADVNAKDNDGQTPLHYAVTCEREAIAEYLVKHNADIYSKDNDGSSPRDICESNWPCMQHVGEEVN

SEQ ID NO: 30120 - protein, 126 aa, Glycine max
  Clone ID: TF_GmC180289_1.pep
KEEEKKKENEERNLLRRGASPHVMDKDGAAPLHYAVQVGAKMTVKLLIKYKADVNVEDNEGWPPLHIAIQSRNRDIAKILLVNGADKTRKNKDGKTALDLSLCYGKDFKSYDLAKLLKTVPADSYL

SEQ ID NO: 30121 - protein, 526 aa, Glycine max
  unsure (1)..(526): unsure at all Xaa locations
  Clone ID: TF_GmC317_1.pep
RYIPKMMKKQLTGIRGDSPLQSAIRVGNLELVLEIISQSPEDELKELLSKQNNSFETALYVAAENGHLDILKELIRYHDIGLASFKARNGFDAFHIAAKNGHLEILKVLMEAFPEISMTVDLSNTTVLHTAAAQGHIEVVNFLLEKGNSLVTIAKSNGKTVLHSSARNGYLEVVKALVEXEPEIAMRIDKKGQTALHMAVKGQNLELVDELVKLNPSLANMVDAKGNTALHIATRKGRLQVVQKLLEXREINTDVINKSVETALDTAEKNGRLEIANFMQHLGAQSATSIKSLTTDTVLEHKQIVSDIISEVHXQLEHTIKTQRRMQGIAKRINKMHTEGLNNAINSNIVVAVLIATVAFAAIFNVPGQYPEKPSELSPGMSPGEAYIAPDIGFMIFIIFDSTALFISLAVVIVQTSVVVIERKAKRQMMAVINKLMWVACVLISVAFIAMSYIIVGDHKELAIAATALGTVIMAATLGTLCYWVIAHRLEASRLRSLRTTMSSRQSMSMSMMSGSENEYKTVYAI

SEQ ID NO: 30122 - protein, 157 aa, Glycine max
  Clone ID: TF_GmC315_1.pep
MGATEANTTLQARPETTSENIEALLDAARYDDMDDVKSLEASGVPLDSKDEQGRTALHMAAANGHIDIVEYLISRGVDLNSPNEEKNTPLHWACLNGHVEAVKKLIMAGANVSVLNSHERTPMDEAVSGGKPEVMDAINEAVALVELRGAMVFAQET

SEQ ID NO: 30123 - protein, 441 aa, Glycine max
  unsure (1)..(441): unsure at all Xaa locations
  Clone ID: TF_GmC6409_1.pep
MGQTLSCVQQHEDHGVLFPALASGELEVVEAMVEEDPTVLEHTIGCDRLSPLHVAAANGRIEVLSMLLDRSFNVDVLNRHKQTPLMLAVMHGKTGCVEKLIHAGANILMFDSIRRRTCLHYAAYYGHIDCLKAILSAAHSTPVADSWGFARFVNIRDGNGATPLHLAARHRRSECLHALLDNGALVCASTGGYGYPGSTPLHMAARGGSLDCVRMLLAWGADRLQLDSSGKIPFSVALKHKHCACAXVWPSPLKFISELNQEAKALLEKALQEANREREKTILKETDMPPSPLNSESEDDNIASEASDMELCCICFDQACTIEVRPCGHQMCAHCTLALCCHKKLDPATTGLSGPXLATCVDPFFSLCILRLTQFQDTVAKINKISDTEVESGPMKPRRSRKSNFSEGSSSFKSLSAMGSFGRIAGRNSGKITDEKQWEVS

SEQ ID NO: 30124 - protein, 273 aa, Glycine max
  unsure (1)..(273): unsure at all Xaa locations
  Clone ID: TF_GmC6409_2.pep
HXAARYIWPECLHALLDNGALVCASTGGYGYPGSTPLHMAARGGSLDCVRMLLAWGADRLQLDSSGKIPFSVALKHKHKACAALLDPSSAAPLVWPSPLKFISELNQEAKALLEKALQEANREREKTILKETDMPPSPLNSESEDDNIASEASDMELCCICFDQACTIEVRPCGHQMCAHCTLALCCHKKLDPATTGLSGPVCPFCRGSILQLLVAKINKISDTEVESSPMKPRRSRKSNFSEGSSSFKSLSAMGSFGRIAGRNSGKITDEKQ

SEQ ID NO: 30125 - protein, 903 aa, Glycine max
  Clone ID: TF_700838909_FLI.pep
MRELLLAGADPNAVDDEGESVLHRAIAKKYTDCALVILENGGCRSMAILNSKNLTPLHHCVAIWNVAVVKRWVEVATSDEIAEAIDIPSPIGTALCMAAASKKDHENEGRELVRILLAAGADPSAQDSQNGRTALHTAAMTNDVDLVKDDDGDNAFHIAAETAKMIRENLDWLIVMLMKPDADIEVRNHSGKTLRDILEALPREWLSEDLMEALVNKGVHLFPTIFKVGDWVKFKRSVTTPTHGWQGAKPKSVGFVQSVPDRDNLIVSFCSGEVHVLANEVIKVVPLDRGQHVHLKEDVKEPRFGWRGQSRDSIGTVLCVDDDGILRVGFPGASRGWKADPAEMERVEEFKVGDWVRIRPTLTSAKHGLGSVTPGSIGIVYCIRPDSSLLIELSYLPNPWHCEPEEVEHVAPFRIGDQVCVKRSVAEPRYAWGGETHHSVGRISEIENDGLLIIEIPNRPIPWQADPSDMEKVEDFKVGDWVRVKASVSSPKYGWEDVTRTSIGVIHSLEEDGDMGVAFCFRSKPFSCSVTDMEKVPPFEVGQEIHVMPSVTQPRLGWSNESPATVGKILKIDMDGALNVRVTGRQNLWKVSPGDAERVPGFEVGDWVRSKPSLGTRPSYDWNSVGRESLAVVHSVQDSGYLELACCFRKGKWITHYTDVEKVPSFKVGQYVRFRTGLVEPRWGWRGAEPESHGVITSIHADGEVRFAFFGLPGLWRGDPSDLEIEQMFEVGEWVRLNYNANNWKSIGPGSVGVVQGIGYEGDELDRSIFVGFCGEQEKWVGPSSHLERFDKLFVGQKVRVKQYVKQPRFGWSGHTHASIGTIQAIDADGKLRIYTPAGSKTWVLDPSEVEVVEEKELCIGDWVRVKASISTPTHHWGAIHVLMLINRRGGRMEAVEIGKLSC

SEQ ID NO: 30126 - protein, 648 aa, Glycine max
  unsure (1)..(648): unsure at all Xaa locations
  Clone ID: TF_GmC770_1.pep
MPGSLILPLALSQLALLPPIPPFIFRISQLSPIIPTPKTNSSSYSYPLFLTSTIAMASHSNQPGPGAEGLGEKDPPTSFQNPLSEISPSPSPSSAPAPALVLSNSGKRIDQAGKKKYVKQVTGRHNDTELHLAAQRGDVGAVRQILEDVDSQIMGTLSGDGDEDDLNAEIAEVRACLANEENELGETPLFTAAEKGHLDVVKELLNYSTAQTVSKKNRSGFDPLHIAASQGHHPIVHVLLDYDPGLSKTIGPSTSTPLITAARRGHTVLVNELLSKDCSWFDITRSYGKNAWHCAVRQVHVXEIVKALISIEPQLARRTDKKMQIALHMAVKGQSCDVVKLLLEADAAIVMLPDKFGNTALHVATRKKRVEIVNELLHLPDTNVNALTRDHKTALDIAEDLPLSEEASDIKDCLSRYGALRANELNQPRDELRKTVTQIKKDVHTQLEQTKRTNKNVHNISKELRKLHREGINNATNSVTVVAVLFATVAFAAIFTVPGGDDDDGSAVVAAYAAFKIFFVFNAIALFTSLAVVVVQITLVRGETKAEKRVVVVINKLMWLASVCTSVTFIAASYIVVGKKNEWAAILVTLVGGVIISGVIGTMTYYVVRSKRSRSMRKKEKQAARRSGSNSWHHSEFSNSEVDPIYAL

SEQ ID NO: 30127 - protein, 614 aa, Glycine max
  unsure (1)..(614): unsure at all Xaa locations
  Clone ID: TF_GmC540_1.pep
RASGEVAQKLLLESESKRGKNSLIRAGYGGWLMYTAASAGDLGFVQVLLERNSLLVFGEGEXSVTDILYAAARSKNCEVFRLLFDFAVSPRFLSGKGGIMEENVGDIPSVYRWELTNRAVHAAARGGNLKILEELLANCSDVLAYRDADGSTVLHAAAGRGQVEVIKYLTSSFDMINSTDHQGNTALHVASSRGQLPTAEALVSAFPSLMSLRNNSGETFLHRAVSGFKSHAFRRLDKQVELLRNMLSGKNFHVADIINVKNNDGRTALHMAIIGNIHTDLVQLLMTAPSINVNICDVDGMTPLDYLRQHPKSASSDILIKKLISAGGMFGCQGHSSRKAIASHLRMQSIGSSPGTSFRVSDTEMFLYTGIENVSDASGDHGSGGMSSSSSEHIPYDLNATENRVPIAAKRPSTVNHAAASLKRVLLWPRVKDKKSEGFKKSSTTDEGSVDSCRKRNNSFDETPTPLRQRFSRPSSLPNNKRTLSVRSQQSSPNAKKRFASGPVHGVIQSMPHANVSGRSRSSSFSKSSISSPRSIDKQKGIFIDNDIAGPSCSSQPSPPPDDDESPKLVKRTSVGRKLRDHYFCFGAPGINVKNSVHRQQESQSYKAHVVAVA

SEQ ID NO: 30128 - protein, 484 aa, Glycine max
  Clone ID: TF_GmC1240_2.pep
MNNINNNRSQDQRSRPAKAATIHGCALSGDLVGLQRLLRDNPSLLNERNPVMAQTPLHVSAGHNRTEIVKFLLDWQGADKVEMEAKNMYGETPLHMAAKNGCNKAAQLLLARGAIVEARANNGMTPLHLAVWYSLRAEEFLTVKTLLEYNADCSAKDDEGMTPLNHLSQGPGTEKLRELLLWHLEEQRKQRAIEACSETKAKMDELEKQLSNIVGLNDLKVQLRKWAKGMLLDEKRRSLGLHVGRRRPPHMAFLGNPGTGKTMVARILGKLLHTVGILPTDKVTEVQRTDLVGEFVGHTGPKTRRKIKEAEGGILFVDEAYRLIPMQKSDDKDYGLEALEEIMSVMDSGKIVVIFAGYSKPMKRVITSNEGFCRRVTKFFQFNDFNSEELAQILHIKMNNLAEDSLLYGFKLHTDCSIKSLAALIERETTEKQRQETNGGLVDTMLVNARENLDLRLSFDCMDTEELLTITLVDLEAGLQLLTQ

SEQ ID NO: 30129 - protein, 365 aa, Glycine max
  unsure (1)..(365): unsure at all Xaa locations
  Clone ID: TF_GmC303801_1.pep
TKRLSQILRLNRTTFINLVHSNIGDGAIVMNNFLQHLQESRYPGMDVILAETEAMLARGKMDMPITTCFAVTRNDDLLLHRLLKRGSDPNELDRSGKTALHIAASKGNEHCVNFLLEYGADPNSKDMDGSVPLWEAMKGRHESVMKILIDNGADISFADAXHLACSAVEQNXVGIAQEIIPCGMDVTQPKKNGATALHTAVVEGNTEMINFLVDQGADIDMQDVNGWTPRVLAEQSESEEIKNIFHDIKDSRKPGVIPISKNDNRSGRFQIDPSMLTIPQESMLLPPYDGRRRSSSSFDNSIFGMMSTANRAKKDLQASESRSTRRSVNGLARVTLSCPEKGEHAGKLVLLPKTLEKLLEFGARK

SEQ ID NO: 30130 - protein, 190 aa, Glycine max
  unsure (1)..(190): unsure at all Xaa locations
  Clone ID: TF_GmC465104_1.pep
MEEFEDAVSFVSKNSGMKTSQDDKLRFYSMYKLATVGPNDTPRPGFFDFAGRAKWDAWKSCGELSPEDAKTEYVKLLDRLDPKWRETLPNLPKHSKAQSNNEDVGGPVFSMPQFEEEIIPEEDRTLAYYVSSGEDSKVLELIATAHNKTSLIDKRDKDGIAAIHYACDRGHQQLXKILLDNGADIDIPDE

SEQ ID NO: 30131 - protein, 125 aa, Glycine max
  unsure (1)..(125): unsure at all Xaa locations
  Clone ID: TF_GmC611_5.pep
MGNSFGCSASGERLVSAARDGDLVEAKMLLECNPCLAKYSTFGGLNSPLHFAASKGHNEIVALLLENGADVNSRNYWGQTALMQACRYGHWXKVVQTLLLFRCXVGKADYLSGGTXFYFAAINGA

SEQ ID NO: 30132 - protein, 251 aa, Glycine max
  Clone ID: TF_GmC614_1.pep
MSTFATRSLVSVESTTTIEGTEADNVDSDSLFRGCVLEGRWDFVLTAYRNDSNYHKIKINESRGTALHVAVNDGKVELVNTLVVAILNHEGREVLRDDSALKTTNERGDTPLHLASSRGFIGMCKCIIGELKERKDLIRVRNNKGETPLFRAVLTCHTKTFVYLHHVSKDIDVPLRNYDGDTILHHAIWREFLDLAIIIIHCYPGLVEMRNKDGATPLKVLACKPSAFRSGINLPWWKKILYYGKCCVRGG

SEQ ID NO: 30133 - protein, 267 aa, Glycine max
  unsure (1)..(267): unsure at all Xaa locations
  Clone ID: TF_GmC755_1.pep
RRDSPPPKLNYRHVIXRHRWTGRYEAHLWDKNCWNESQSKKGRQGAYDDEEAAARAYDLAALKYWGQDTILNFPLSNYEEKLKEMEGQSKEEYIGSLRRKSSGFSRGVSKYRGVARHHHNGRWEARIGRVFGNKYLYLGTYATQEEAAAAYDMAAIEYRGLNAVTNFDLSRYINWPRPKTEENHQTIPSNENVNSNAELELGSASDEITEEGVAPSSESNPSRRTFPEDIQTIFENQDSGIYTENDDIIFGDLGSFGAPIFHYELDV

SEQ ID NO: 30134 - protein, 119 aa, Glycine max
  Clone ID: TF_GmC6107_6.pep
DWNKYDECVNATASVDKSVKVWDVRNYRVPLCVLNGHGYAVRKVKFSPHVRNLMVSCSYDMTVCVWDFMVEDALVSRYDHHTEFAVGVDMSVLVEGLMASTGWDELVYVWQHGTDPRAP

SEQ ID NO: 30135 - protein, 92 aa, Glycine max
  Clone ID: TF_GmC1178_4.pep
MSRFMNAPSSPGLSPLFGVGHKRAREDDTGAGASVGLGVVAAASSQTQGNESGGGERRRRYRRVRQRPWGKWAAEIRDPHKAARVWLGTFDT

SEQ ID NO: 30136 - protein, 77 aa, Glycine max
  Clone ID: TF_701208549_FLI.pep
KQLCHKVGVKREREEESERKNNYEKSEFNNNSNSNKHVKKEECPLTPSCWKGFWDTDVMGTIFSVPPLSPLSPLMVV

SEQ ID NO: 30137 - protein, 55 aa, Glycine max
  unsure (1)..(55): unsure at all Xaa locations
  Clone ID: TF_5760111.pep
RYTGIRMRXCGKWFDEIRARNMRSMIWLASYSTPVAAVRAYDTVVCDVLGPCARL

SEQ ID NO: 30138 - protein, 172 aa, Glycine max
  Clone ID: TF_jC-gmXLIB3563P053ac08a2.pep
MANSLEVSALNRIKLHLLGELSPLPLTTSSQSSSICSQSSCSDSSATLDQIFSEFLYFPTSSSENHFSALEFEAKPEIIYLETPNPQLEFTSLTTQDSKKPQSSRKPSLQISLPKKTEWIQFGDPEVTETVSQSNPNAEEKKHYRGVRQRPWGKFAAEIRDPNKRGSRVWLG

SEQ ID NO: 30139 - protein, 39 aa, Glycine max
  Clone ID: TF_7639988.pep
RVMQRTWGKWAAEIREPNIGYMLWLGTFPTVIGAALAYD

SEQ ID NO: 30140 - protein, 111 aa, Glycine max
  unsure (1)..(111): unsure at all Xaa locations
  Clone ID: TF_7478255.pep
MLSCXYIYLGLFNSEIXTARAYNKAXIXCNGREAVTNFXPSTYKSKMKPKAINESGXHNLNLSLGIATPRHGPKKNGHLQFSIPYNIHPRKSSMIETNINSVIDNPSLKRL

SEQ ID NO: 30141 - protein, 42 aa, Glycine max
  Clone ID: TF_7326474.pep
HPLFRGVRKRRWGKWVFQIREPRKKSRIWVGFFPAPENGGKG

SEQ ID NO: 30142 - protein, 101 aa, Glycine max
  unsure (1)..(101): unsure at all Xaa locations
  Clone ID: TF_LIB4128-090-Q4-K1-D1.pep
IPQRPWGEGAAXIPDPREGGPVXVXTFXTAEKAAKAYHAXARGGPGXRAXVSFPEEPSGAASSKRVKGSPEGQPMRKNPSSVRPRINQRCNFENRGLLQAY

SEQ ID NO: 30143 - protein, 98 aa, Glycine max
  unsure (1)..(98): unsure at all Xaa locations
  Clone ID: TF_19935601.pep
ITVHPEKNEGNVFFFKKRHWGRYSAKIINPGNKNRAWIGTVYTLXDAKCDYDDTDLEFLGPKDKTNLPLPYENVNNSNPRQRTNNQTSSRHCDINTDN

SEQ ID NO: 30144 - protein, 197 aa, Glycine max
  unsure (1)..(197): unsure at all Xaa locations
  Clone ID: TF_GmC289_1.pep
SCIVVEVRRGRTAAAAAAVVDPTPDQAKETTRFRGVRKRPWGRFAAEIRDPWKKQRVXRPKPISPPSPAPQRRTTTRRFPLYQAHGLSTKFEPVVQVNRPTSSGMSSTVESFSGPRVPSSSSRAKPLVVVVNPIIPLNDDEDDCHSDCDSSSSVVDDGQDCVLISSFRQPLPFDLNLPPSDADDDNDDDLPATALCL

SEQ ID NO: 30145 - protein, 228 aa, Glycine max
  Clone ID: TF_GmC15818_1.pep
MVSLRRRRLLGLCSGNSSFVTPLPLYCENLSGFENSNQQAKPKSEQPALSDDASNPDSNNAVQEEPGSSNASGSSSSKEQLIQQITGPPIKRRKRHRRKNLHNQEQCIMRGVYFKNMKWQAAIKVDKKQIHLGTLGSQEEAAHLYDRAASMCGREPNFELPEEEKRDLSKFKWDEFLAMTRQAITRKKHKRRLSPGPGNSHDMLPLSKDDWDTKQGVIEDAEQETSVS

SEQ ID NO: 30146 - protein, 129 aa, Glycine max
  Clone ID: TF_GmC5695_1.pep
PPALTLPILRHLLPPLPLQQTLRQPRLQIHQRSRPSQRHQGHHSLVPESQKPNKRTMRIFCKVIRDPSKYRRKRGFEWEPSILPRKLLEPTTPPLGLSEVPSQNKNPSLTFLLQPHHRSFLLRGFPHLP

SEQ ID NO: 30147 - protein, 85 aa, Glycine max
  Clone ID: TF_LIB3242-503-P1-J1-B10.pep
MFSINHFSAPDANSPGSGSGTSRPVPALSDEDYFLAASNPKKRAGRKKFRETRHPVYRGVRRRDSGKWVCEVREPNKKSRIWLGT

SEQ ID NO: 30148 - protein, 107 aa, Glycine max
  unsure (1)..(107): unsure at all Xaa locations
  Clone ID: TF_jC-gmX3027002H12sg1M2a1.pep
KPTRNNKARHPTPKHKQTGGTRNENDRQDTDTHQERHEANXSTNTTPPQPTRNRTKKHHRGARRRPRGKDAXETRDTARHGARTGHGTTQTXEEXAXAXDRAAHKKR

SEQ ID NO: 30149 - protein, 180 aa, Glycine max
  unsure (1)..(180): unsure at all Xaa locations
  Clone ID: TF_LIB4167-034-R1-N1-C6.pep
FIILVAGTEEEAAEAYDIAAIKFRGLNAVTNFDMSRYDVKAILESNTLPIGGGAAKRLKEAQALESSRKREEMIALGSSTFQYGTTSSNSRLHAYPLMQHHHQFEQPQPLLTLQNHDISSHFSHQQDPLHQGYIQTQLQLHQQQSGGSSSYSXQNNNINNAQFYNXYNLQNHPALLQGMI

SEQ ID NO: 30150 - protein, 210 aa, Glycine max
  unsure (1)..(210): unsure at all Xaa locations
  Clone ID: TF_GmC12225_4.pep
MNNNWLSFPLSPTHSSLPAHDLQATQYHQFSLGLVNENMENPFQNHDWSLINTHSSSEVPKVADFLGVSKSENESDLAASLNEIQSNDSDYLFTNNSLVPMQNPAVDTPSNEYQENANSSLQSLTLSMGSGKDSTCETSGDNSTNTTTTTTVEAAPRRTLDTFGQRTSIYRGVTRHRWTGRYEAHLWDNSCRXREGQSRKGRLRNLSKLF

SEQ ID NO: 30151 - protein, 124 aa, Glycine max
  unsure (1)..(124): unsure at all Xaa locations
  Clone ID: TF_LIB3242-364-Q1-J1-B6.pep
STSTRFSIAYLPISEASSSASNEKLXHSVEGXXPMLSFGKSVSQILEPKKKNRIWLGTFATANIATRAHDIXSLSIKSNSSILNFPXLISYLPRPDSNSPIDIHSATAKSTPIEVNDSPTTPTS

SEQ ID NO: 30152 - protein, 159 aa, Glycine max
  unsure (1)..(159): unsure at all Xaa locations
  Clone ID: TF_GmC1505_2.pep
MGTAIGMYSNNNIVPDFLDPYSEELMKALMPFMKSDYFSASSSSSSRESHPSPLIPSNSLPSSNQIRLNQLTQDQILQIQAQIHIQQQHVAQGQAHLGPKRVPMKHAGTAAKAAKLYRGVRQRHWGKWVAEIRLPXNRTRLWLGTFDTAEEATLAYDNA

SEQ ID NO: 30153 - protein, 204 aa, Glycine max
  Clone ID: TF_GmC92576_1.pep
NSRIRGRGTLTPRSGEIGTPSLRGVRKWFGVSNTAEEAALVYDNAPTRRRRPRARTYVTAPLAAVVSHNAALLPPAPLALTSVITPPAREETHCNSKNIFSPTSVLHCCSLSEEAESVTAKDDDYSSVSENKVKAESAFPPEIDFEFRACSTVPESLLFCDDDWSSEFLNSYEDFGFKSWHTDRNRDFFQDIDDLFVSDPLLAL

SEQ ID NO: 30154 - protein, 37 aa, Glycine max
  unsure (1)..(37): unsure at all Xaa locations
  Clone ID: TF_jC-gmXLIB3564P109bh09b1.pep
IKIMKWGKWVAVIIXPNKRARIWFGVYTTPLNGAGAY

SEQ ID NO: 30155 - protein, 183 aa, Glycine max
  Clone ID: TF_GmC144838_1.pep
MDIHSNHGATSEGILENVWAKIMSSDRADGRKGDAAECSNSWEELPNLDGREGSMEILQRLPSLGRWISMGADFWEEVLEGIILPNTSNTEYSGSNNNLEIGSANETHNKVGDAVRIEKSVTKHYRGVRRRPWGKYAAEIRDSSKKGARVWLGTFDTAEEAALSYDKAALRIRGPKAYLNFPL

SEQ ID NO: 30156 - protein, 160 aa, Glycine max
  Clone ID: TF_GmC32_1.pep
MEEAGLGDCCSSNSTITRKSDKRKQQHQQQEKPYRGIRMRKWGKWVAEIREPNKRSRIWLGSYATPVAAARAYDTAVFHLRGPSARLNFPELLSQDDDVSTQQQGNMSADSIRKKATQVGARVDALQTALQQSSSSHSANSSHVSSSDKPDLNEYPKPED

SEQ ID NO: 30157 - protein, 159 aa, Glycine max
  Clone ID: TF_GmC32_2.pep
MEEAGLGDCCSSNTTITRKSEKRKQQHQQQEKPYRGIRMRKWGKWVAEIREPNKRSRIWLGSYATPVAAARAYDTAVFHLRGPSARLNFPELLSQDDDVSTQQQGKMSADSIRKKATQVGARVDALQTALQQSSSTHSISSSHVSYEKPDLNEYPKPED

SEQ ID NO: 30158 - protein, 208 aa, Glycine max
  Clone ID: TF_GmC268_2.pep
MVKEKKNVVVKNKKPNNNADELHFRGVRKRPWGRYAAEIRDPGKKTRVWLGTFDTAEDAARAYDAAARNFRGPKAKTNFPVPPDDNNNNNVNVNKNKSVNVKSHSPSQSSTVESATPEREATRRSTSAAIDRFPFLPIQQQILMTHPVAAPMRPVFFLDRAHFMTQSFPLRFEPGPVQSDSDSSSVVVDCQPKRELNLDLNLAPPNEY

SEQ ID NO: 30159 - protein, 302 aa, Glycine max
  Clone ID: TF_GmC97_1.pep
MAALMDFYSSSPEFQLHSDPFRGELMEVLEPFMKSPSPNYFPSSPSLPNLYSNGLSSNTQSLIGFGQAQPTSLVGLNHLTPSQISQIQAQIQIQAQQHQNRSNTLSFLGPKPIPMKHAGMPPKPTKLYRGVRQRHWGKWVAEIRLPKNRTRLWLGTFDTAEEAALAYDKAAYKLRGDFARLNFPNLRHQGSSVGGDFGEYKPLHSAVDAKLQAICEGLAELQKQGKTEKPPRKSRSKLAEKVVSDKENNNSCKVEAASWSSEGSSPLSDLTFADVSEAQWEGDSDNYNLQKYPSYEIDWDSL

SEQ ID NO: 30160 - protein, 314 aa, Glycine max
  Clone ID: TF_GmC97_2.pep
MAAMMDFYSSSTEFQFHSDPFRGELMEVLEPFMKSPFSTPSPSNSCFLSTSYSPSPNNYSPSLYSNGLSSIPNTTQNLIGFGQGQPTSLVGLNHLTPSQISQIQAQIQIQNHSNTLSFLGPKPIPMKHVGMPPKPTKLYRGVRQRHWGKWVAEIRLPKNRTRLWLGTFDTAEEAALAYDKAAYKLRGDFARLNFPNLRHQGSSVGGDFGEYKPLHSAVDAKLQAICEGLAELQKQGKTEKPPRKTRSKLASPPENDNNNDNNSCKVEAASSSSEGSSPLSVLTFADVSEPQWEGDSDNFNLQKYPSYEIDWDSL

SEQ ID NO: 30161 - protein, 503 aa, Glycine max
  Clone ID: TF_GmC307_1.pep
MWNLNDSPDQRKDYESEGCSSSLNDDKGKRVGSVSNSSSSAVVVEDGSEEEDSERGGSRTLDKKTNKIFGFAVAHDDSDHPPVTHQFFPVEDSELPVSAAAAGSGGGGGGSSFPRAHWVGVKFCQSETPGAGKAVKVSEPMKKSRRGPRSRSSQYRGVTFYRRTGRWESHIWDCGKQVYLGGFDTAHAAARAYDRAAIKFRGVEADINFNIEDYEEDLKQMTNLTKEEFVHVLRRQSTGFPRGSSKYRGVTLHKCGRWEARMGQFLGKKYVYLGLFDTEIEAARAYDKAAIKCNGKEAVTNFDPSIYDSELNSESSGGVAADHNLDLSLGNSSSKHNNSQTSGNHFANSATDQHMPPESNWRNGGSKPKLVNILPKPCGRSNIEAYGHGESETLRLLSQTHLQSPTNKEMHRYGPYRSPAEPQKPHNFAHHLHQPSFHVPSSSSNGGRIGSDLSLSMSDQQQWQAGPPHLLATAAASSGFPQQIRPSQGWLQKNGFHSLMRPS

SEQ ID NO: 30162 - protein, 593 aa, Glycine max
  Clone ID: TF_GmC25_1.pep
MRKICCLYWLCIWSDRCRPEELRILRENTNYWKVKKINSTEQRIGGFCPLTPKEVGIFLHALGYPPSTPIYIAAGVIYGGNTHLSELSSRFPSIIFKESLATPEKLTDGAIVMDADATSALHKRGIVPTNDSFKYAWFKDHESVVKAIYTGSEFVDTVNTGDDIGVVLESTSFYAEQGGQIFDTGSLEGPHALFEVRNVQVYGGFVLHIGNGTGVSVGDKVVCKVDYGRRALIAPNHTCTHMLNFALREVLGDHVDQKGSIVLAEKLRFDFSHGKPIEADNLRRIESIVNEQIKAELDVSAKEATLAEAKGINGLRAVFGEVYPDPVRVVSIGQKVEDLLADPKNEKWLSISSELCGGTHISNTREAKAFALLSEEGIAKGIRRITAVTTDRAYDAMKVADEFEQQVDDAAKLVGTLLEEKVSSLKSNIETLSIPAAKKADIKIKIVRLQDQVRKAQKQVAEENKRKAVMITAEKAELAVSNGKTFCISLVDVGLDVAAVREAVTKVMDQKGLSVMVFSTDESTNKAVVCAGVPEKGGKGNLDVADWLSNALGPLKGRCGKGKGGLATGQGTEASHVNEAIDLAEKFASMKLS

SEQ ID NO: 30163 - protein, 384 aa, Glycine max
  Clone ID: TF_GmC326_5.pep
MDAISCLDESTTTESLSISQAKPSSTIMSSEKASPSPPPPNRLCRVGSGASAVVDSDGGGGGGSTEVESRKLPSSKYKGVVPQPNGRWGSQIYEKHQRVWLGTFNEEDEAARAYDVAVQRFRGKDAVTNFKPLSGTDDDDGESEFLNSHSKSEIVDMLRKHTYNDELEQSKRSRGFVRRRGSAAGAGNGNSISGACVMKAREQLFQKAVTPSDVGKLNRLVIPKQHAEKHFPLQSAANGVSATATAAKGVLLNFEDVGGKVWRFRYSYWNSSQSYVLTKGWSRFVKEKNLKAGDTVCFQRSTGPDRQLYIDWKTRNVVNEVALFGPVVEPIQMVRLFGVNILKLPGSDSIANNNNASGCCNGKRREMELFSLECSKKPKIIGAL

SEQ ID NO: 30164 - protein, 339 aa, Glycine max
  Clone ID: TF_GmC194331_1.pep
LGPTNQWRVRLPQPQETKPTATTTTETTPSETSNSNTNNKISSRKCKGTRPPDNNKFRYRGVRQRSWGKWVAEIREPRKRTRKWLGTFATAEDAARAYDRAAIILYGSRAQLNLQPSGSSSQSSSSRSSSSSTQTLRPLLPRPSGFSVNFPFNTATVPYPYNNSHNYTYSPPVLCPNDNHNNNIVQVHHPHHHRCPEELVQVQVAHTLSTSYQHNSESDVGLGVNNNVFVVDGSIRSTSYQRHGFLDSNNNHVHVQVQHGVLLNQQQQQHQNGVVVEGVNNSPVVGSVASAMDAFSVDPDLALVGTMGLGSFSPFWSMANEDDYTGSLWDYNDPFFFDL

SEQ ID NO: 30165 - protein, 202 aa, Glycine max
  Clone ID: TF_GmC194331_2.pep
TRPVVSAKVKGGPDNNKFRYRGVRQRSWGKWVAEIREPRKRTRKWLGTFATAEDAARAYDRAAIILYGSRAQLNLQPSGSSSQSSSSRSSSSSTQTLRPLLPRPSGFTFNFPFNSAPATTVPYPYNNSHNYTYTPPVLYPIDNSKNHNINTVQVHHPHHYPRVREVVQVPHSESDLGGLGGNNNIVVDGSIRSTSYQRHGFG

SEQ ID NO: 30166 - protein, 119 aa, Glycine max
  Clone ID: TF_17023892.pep
NVWTCVCVCEGNVRRHYRGVRQRPWGKWASEIRDPKKAARVWLGTFETAEAAALAYDEAALRFKGTKAKLNFPERVHFSKEFGYLTNRPSLFHASATPLSDQHSQVFGGTATNNDAMPR

SEQ ID NO: 30167 - protein, 230 aa, Glycine max
  Clone ID: TF_GmC104_1.pep
MSSSSFSPATLTTEQELSVIVAALTNVVAGSTSASSSFSLPEFRLPQTSDPLAAACLMPPPPPPSMDTCRECNIAGCLGCNFFPEEKKKQKRAKKKYRGVRQRPWGKWAAEIRDPRRAARVWLGTFGTAEDAARAYDKAAIEFRGPRAKLNFPLVDESLTLQQSEPERVQTEEEQIKTENLNQGMEMDSFGNKDTEFWDRINEADFHQLMMMMDFAGDSSDSATGNALSS

SEQ ID NO: 30168 - protein, 136 aa, Glycine max
  Clone ID: TF_LIB4391-059-R1-K1-C1.pep
PQSKKRVLTHTPSTRRSTCGKYRGVRQRKWGKWAAEIRDPFQCTRIWLGTFNTAEEASKAYETRRLEFEAMAKTQTLKTGSEPLSTTSDKSNCCNSSAAAAADVSVSEKFSTTSDDSEESMLSHNSPSSVLELDTS

SEQ ID NO: 30169 - protein, 285 aa, Glycine max
  Clone ID: TF_GmC91_1.pep
MENNNHHAMAAGASSDSNTSDHTTPISSSCVNDNNNNKLYKGVRKRKWGKWVSEIRLPNSRERIWLGSYDSPEKAARAFDAALYCLRGRHANFNFPNTPCNMDTATNAPPNQSLTPPEIQEVAAKFANQVSPLLQKPQEQPQPQRSSDGGGGGANSSSFGSKLLCKSDSIAESSTTSTTTNCTPTTTASSCSATMYECDGTEQVDRGDMMDWTFLNVFDFSNEVVLPAVGSDYNDLYNSELHKMHSDSGELLYSTPFEGYEQLIEADHDDDDPFSHQSFLWNWNF

SEQ ID NO: 30170 - protein, 313 aa, Glycine max
  Clone ID: TF_GmC1423_2.pep
GRQVYLGGYDMEEKAARAYDMAALKYWGPSSHINFPLENYQNELEEMKNMTRQEYVAHLRRKSSGFSRGASMYRGVTRSHRLAFTQHHQHGRWQARIGRVAGNKDLYLGTFSTQEEAAEAYDIAAIKFRGFNAVTNFDITRYDVERIMESNNLLSSEQAKRKREMDDGTRSEATVNQKPCTTQETVLMQKRCRSQSEWKMVQYPSSQQLDQNPQRIECSRTESLSTALDNMFHHQVEESSNMGTHLSNPSSLVTSLSSSREESPDKTSLPMLFGMPSTVSKLLADVDSLDLSSNLRPSLSIPQMPIFAAWTDA

SEQ ID NO: 30171 - protein, 317 aa, Glycine max
  Clone ID: TF_GmC1349_1.pep
MEGMRDTKSQLEIQDQEGTNIGSSLSKLILASGSGTNTLDSIFSNCPQTTNGSTSSNSVLDDLEPFKSSGCEPLGSSVYLRQRDILQKFYQESRGNGSYNVPTSSLSNSLTNPCKKKLYRGVRQRHWGKWVAEIRLPQNRMRVWLGTYDTAEAAAYAYDRAAYKLRGEYARLNFPNLKDPTKLGFGDSARLNALKSSVDAKIQAICQKVKRERAKKNAAKKLHNSTDPKRGQSEKPSSSSSPSPSPSPSSIFNDNWANQLFSPAVSEDGFWKGENSHSPASVLTECQTEETELLFEGCSLARLPSFDPELIWEVLTV

SEQ ID NO: 30172 - protein, 304 aa, Glycine max
  Clone ID: TF_GmC1488_1.pep
MLKSGMGIQERKKVKKPAQASSRKGCMRGKGGPENATCTYKGVRQRTWGKWVAEIREPNRGARLWLGTFDTAREAALAYDAAARKLYGPDAKLNLPELSVPYAAGVMNPSHMQQQQQQQQQPQVPQMMMQQQQPLVHPTFDLVNVTPHSDFNNNSINILNNNPVVSSMASSFLADAAAPVYTSCDSIVSLPLSATNYTTNNTVPMEMDGYYYSSIAVESKEDDMFRPFWGPTMDDTMPVSDESIWTEAAMSLDYPIVGGGGGFVTTENLFGEATAWTPCKLLLSACKLSSDERDRQYSNKVLCL

SEQ ID NO: 30173 - protein, 232 aa, Glycine max
  Clone ID: TF_GmC1216_1.pep
MVMEESNPLDNEVQPTTSSSSFTITTPSTSSSSSIEEATNTTTKEKKKKRAISNIEGKHPTYRGVRMRQWGKWVSEIREPRKKSRIWLGTFPTPDMAARAHDVAALTIKGSSAYLNFPELAAKLPRPASTSPKDIQAAAAKASALDFGHQSHEAESELSQAVSSSIQTQSSSSSSNSSLKGVDDTFLDLPDLSLDLSHGADEFHYSSAWLVAGAEHIELGFRLEEPFLWESY

SEQ ID NO: 30174 - protein, 222 aa, Glycine max
  Clone ID: TF_GmC464_2.pep
MRKGRGGGASAAAAAAVNGSVLKEPRYRGVRKRPWGRFAAEIRDPLKKARVWLGTFDSAEDAARAYDTAARNLRGSKAKTNFPLSPFCYQHPTTDPFFYAGFHDHQNNSNNNNDNLNNPQRPTSSGMSSTVESFSGPRPPTTTTTTTTPFLTTTRRYPRTPPLVPEDCHSDCDSSSSVVDDSDDNIVSSSFRPPLPFDLNALPFDDDAAVVDDDLRCTALCL

SEQ ID NO: 30175 - protein, 382 aa, Glycine max
  Clone ID: TF_GmC826_11.pep
MCGGAIISDFIPAGPASGARRVTADILWPSLRKRFSKPLLDDDFEAGFREFKDDSEIEDVDDEDDEDEEELKKKPFGFSRSSNKAASKPLSRGSATVESKGQAEKCAKRKRKNQYRGIRQRPWGKWAAEIRDPRKGVRVWLGTFSTAEEAARAYDAEARRIRGKKAKVNFPDEPSGAAASSKRLKVNPEAQPMKENLNTVKPKMNQMFNFGHNLEGYYSPIDQVEQKPLVNQYVNPAPFPGNGVQVSPVTPSADVTAYFSSEHSSNSFDYSDLGWGEQVPKTPEISSLLSAAPLEGAADQVQKTNNSQDVVAAQDDSAKTLSEELADIESQLKFFETPSFLDEAWADATLASLLGGDATHDAAGNPMNLWSFDDLPSMAGVF

SEQ ID NO: 30176 - protein, 392 aa, Glycine max
  Clone ID: TF_GmC826_12.pep
MCGGAIISDFIPAGPAGGAQRVTADILWPNLRKRFSKSLLDDDFEAGFREFEDDSEIEDVDDEDDEEEEELKKKKPFGFSRSNNKAASKPLSRGATTVKSVESKGQAEKCAKRKRKNQYRGIRQRPWGKWAAEIRDPRKGVRVWLGTFSTAEEAARAYDAEARRIRGKKAKVNFPDEPSGAASSKRLKANPEAQPMKKNLNSVKPKINQMFNFGDNLEGYYSPIDQVEQKPLVNQYVNRAPFAGNGVQVSPVTPSADVTAYFSSEHSSSSFDYSDLGWGEQVPKTPEISSMLSAAPLDGESQFVQGAADQNQKKNNLLDMASVQDDSAKTLSEELADIESQLKFFETPSFLDEAWADAALASLLSEDASQDAAGNPMNLWSFDDLPSMAGVF

SEQ ID NO: 30177 - protein, 194 aa, Glycine max
  Clone ID: TF_GmC847_1.pep
MCGGAIIADFIPRQRPRTLTASELWPKRSEPQPQPPPPPVKRQRKNLYRGIRQRPWGKWAAEIRDPRKGVRVWLGTFNTAEEAARAYDKEARKIRGKKAKVNFPNEDDPLPQYGSCKSLNLEFGYDLNQTGLFPSSNADENCGSHVAYSVTEANNKVEKLSEELMAYENLMRFYQIPENVVGDLWAFPDTSPPL

SEQ ID NO: 30178 - protein, 218 aa, Glycine max
  unsure (1)..(218): unsure at all Xaa locations
  Clone ID: TF_GmC847_2.pep
MCGGAIIADFIPRQRPRTLTASELWPKRSEPQPQPPPPPGESISSSLSTXNFPTNKTSSRDVTVKRQRKNLYRGIRQRPWGKWAAEIRDPRKGVRVWLGTFNTAEEAARAYDKEARKIRGKKAKVNFPNEDDPLPQYGSCKSLNLEFGYDLNQTGLFPSSNADENCGSHVAYSVTEANNKVEKLSEELMAYENLMRFYQIPENVVGDLWAFPDTSPPL

SEQ ID NO: 30179 - protein, 164 aa, Glycine max
  Clone ID: TF_GmC982_1.pep
MCSISEKAKRKRQSAFRGVRKRSWGRYVSEIRLPGQKTRIWLGSFGSPEMAARAYDSAAFFLKGTSATLNFPDLVHSLPRPLSSSRRDIQSAAAEAALHSPPPKEEQESIFTSTTTSSFHDVMEAPLMSPLRVDSTFGDFSWDQLFDFNDDILIVGSTSATLVP

SEQ ID NO: 30180 - protein, 174 aa, Glycine max
  Clone ID: TF_GmC3803_1.pep
MEDRDHCCSNNSTMITTTKKRTGRRSPTSDKLKNQHREKQSMKPYRGIRMRKWGKWVAEIREPNKRSRIWLGSYTTPVAAARAYDTAVFYLRGPTARLNFPELLFQDDDQEGSDSVQHGAAGNMSADSIRRKATQVGARVDALQTALHHHAPSTNSLNLKPDLNEFPKLEELQD

SEQ ID NO: 30181 - protein, 128 aa, Glycine max
  Clone ID: TF_GmC2485_5.pep
MHMLVKNHNKGDGSKSLADTLAKWKEYNAWLESNNEAEKPARKVPAKGSKKGCMKGKGGPENSRCNYRGVRQRTWGKWVAEIREPNRGSRLWLGTFPTAISAALAYDEAARAMYGSCARLNFPHVQVS

SEQ ID NO: 30182 - protein, 222 aa, Glycine max
  Clone ID: TF_GmC464_1.pep
MRKGRGGGASAAAVDVNGSILKEPRYRGVRKRPWGRFAAEIRDPLKKARVWLGTFNSAEDAARAYDAAARTLRGPKAKTNFPPLSPFCYPHPTTDPFFYTGFHDQHHHHNNNNLNNPQRPTSSGMSSTVESFSGPRPPTTTTTTTTTTATPFLTATRRYPRTPPLVPEDCHSDCDSSSSVVDDGDDNIVSSSFRPPLPFDLNALPFDDAAADDDLRRTALCL

SEQ ID NO: 30183 - protein, 193 aa, Glycine max
  Clone ID: TF_GmC1324_1.pep
MAPRDSRATAFAGPGPGPSPAHKEIRYRGVRKRPWGRYAAEIRDPGKKTRVWLGTFDTAEEAARAYDTAAREFRGAKAKTNFPTPSELILNNNIRSPSQSSTLDSSSPPSPPPPLDLTLTPLSVAVTVFPVARPVLFFDAFARADAMIAVSRREMCGFERPAADFRRNDSDSDYNRRVLLDLDLNVPPLPEVA

SEQ ID NO: 30184 - protein, 193 aa, Glycine max
  Clone ID: TF_GmC1324_2.pep
MAPRDSRATALIGPGPSLSPAHKEIRYRGVRKRPWGRYAAEIRDPGKKTRVWLGTFDTAEEAARAYDTAAREFRGAKAKTNFPTPSELILNNNNINARSPSQTSTLDSSSPPPPPPLDLTLTPLSSAVFPVARPVLFFDAFARADTMVAVSRRETCGFERPAADFRRGDSDSDYNRRILLDLDLNVPPLPEVA

SEQ ID NO: 30185 - protein, 133 aa, Glycine max
  Clone ID: TF_uC-gmroLIB3259P226c09a1.pep
MAPRDSRATAFAGPGPSPAHKEIRYRGVRKRPWGRYAAEIRDPGKKTRVWLGTFDTAEEAARAYDTAAREFRGAKAKTNFPTPSELILNNNIRSPSQSSTLDSSSPPSPPPPLDLTLTLSVAAVFPGLVRFYF

SEQ ID NO: 30186 - protein, 277 aa, Glycine max
  unsure (1)..(277): unsure at all Xaa locations
  Clone ID: TF_GmC1702_1.pep
MANALEVSALNRIKLHLLGELSPLTQFQEPNTTSLCSQSSTSDSFTTVDQIFSEFLDFPTTTTSSTEQNQFSAFEFEPKPEIIEPQLEFSFPTTRCKSSRRPSLQISLPKKTEWIQFGEPEVTETVSQSNPNAEEKKHYRGVRQRPWGKFAAXEIRDPNKRGSRVWLGTFDTAIEAAKAYDRAAFRLRGSKAILNFPLEAGADDRKRQREEKVEPVLEVVKREKIGESDVSLIKNNPLTPSSWLGFWGSDANGIFTVPPLSPLSPHPALGFPQLMVV

SEQ ID NO: 30187 - protein, 134 aa, Glycine max
  Clone ID: TF_7591397.pep
QFQHPKKHLRASTSKGGTGRYNNNTTTSKYVGVRQRASGKWVAEIKDTTQKIRMWLGTYETAEEAARAYDEAACLLRGSNTRTNFITRVSLDSPLASRIQNLVNNRKGTKTKQEQYVVETCDTRIKSNRHESIA

SEQ ID NO: 30188 - protein, 226 aa, Glycine max
  Clone ID: TF_GmC751_1.pep
MTQQATTSSETTTSSSSSSSSSSSTFSPSQHSGPKAQAQKQSKRPRDCSKHPVYHGVRKRNWGKWVSEIREPRKKSRIWLGTFATPEMAARAHDVAALTIKGESAILNFPEIADLLPRPVTCSPRDIQTAATAAASMVKFDPVTQSSDSETPESSELSEIVELPNIEDSSVDSTPEFVLVDVVDSWVFPPMGMGSEGIEFCAAFSDELFPQQSFIGSEIEILPIWD

SEQ ID NO: 30189 - protein, 228 aa, Glycine max
  Clone ID: TF_GmC751_2.pep
MTQQATTSSETTTSSSSSSSSSSSTFSPSQHSGPKAQAQKQSKRPRDCSKHPVYHGVRKRNWGKWVSEIREPRKKSRIWLGTFATPEMAARAHDVAALTIKGESAILNFPEIADLLPRPVTCAPRDIQAAATAAASMVKFDPVTQSSDSETPESSELSEIVELPNIEDSSFDSVDSRPEFVLVDVVDGWVFPPMGMGSEGIEICAAFSDELFPQQSFVDEIEILPIWD

SEQ ID NO: 30190 - protein, 215 aa, Glycine max
  Clone ID: TF_GmC289_3.pep
MRRGRTAAAAAAVVDPTPDQAKETTRFRGVRKRPWGRFAAEIRDPWKKQRVWLGTFDSAEDAARAYDKAARSFRGPKAKTNFPPFPGPAEADHHSQIPLYQAHGLSTKFEPVVQVNRPTSSGMSSTVESFSGPRVPSSSSRAKPLVVVVNPIIPLNDDEDDCHSDCDSSSSVVDDGQDCVLISSFRQPLPFDLNLPPSDADDDNDDDLPATALCL

SEQ ID NO: 30191 - protein, 510 aa, Glycine max
  Clone ID: TF_GmC88_1.pep
MARASTNWLSFSLSPMEMLRTPEPQFVQYDAASDTSSHHYYLDNLYTNGWGNGSLKFEQNLNHSDVSFVESSSQSVSHAPPKLEDFLGDSSAVMRYSDSQTETQDSSLTHIYDHHHHHHHHHHHGSSAYFGGDHQDLKAITGFQAFSTNSGSEVDDSASIGKAQASEFGTHSIESSGNEFAAFSGGTTGTLSLAVALSSEKAVVAAESNSSKKIVDTFGQRTSIYRGVTRHRWTGRYEAHLWDNSCRREGQARKGRQVYLGGYDKEEKAARAYDLAALKYWGPTATTNFPVSNYSKEVEEMKHVTKQEFIASLRRKSSGFSRGASIYRGVTRHHQQGRWQARIGRVAGNKDLYLGTFATEEEAAEAYDIAAIKFRGANAVTNFEMNRYDVEAIMKSSLPVGGAAKRLRLSLESEQKAPPVNSSSQQQNPQCGNVSGSINFSAIHQPIASIPCGIPFDSTTAYYPHNLFQHFHPTNAGAAASAVTSANATALTALPASAATEFFIWPHQSY

SEQ ID NO: 30192 - protein, 106 aa, Glycine max
  Clone ID: TF_LIB3106-046-Q1-K1-E9.pep
MKTCLVVIQLQRLLTINKINVNLTLNITEVITLIPVTKTKPWGRFAAEIRDPWKKQRVWLGTFDSAEDAARAYDKASRRLTLPKAKTNFPPFPGPAEADHHSQIPF

SEQ ID NO: 30193 - protein, 151 aa, Glycine max
  unsure (1)..(151): unsure at all Xaa locations
  Clone ID: TF_6846032.pep
MLKEPNSDILFESFSSKGVDHDPFHDCLSFDMIDNSRDPQEESHHQVIEEAMKTKKKSYIGVRRRPWGRFAAEIRDTTRKGIRVWLGTFDSAEEAALAYDQAAFSMXXSXAVLNFPVKXVKESLQEMNYSGCSRRCSPALELKERHNIRRK

SEQ ID NO: 30194 - protein, 394 aa, Glycine max
  Clone ID: TF_GmC877_1.pep
MGAYDQVSLKPLDSSRKRKSRSRGYGTRSVAETIAKWKEYNEHLYSGKDDSRTTPKAPAKGSKKGCMKGKGGPQNSQCNYRGVRQRTWGKWVGEIREPNRGSRLWLGTFSSAQEAALAYDEAARAMYGPCARLNFPGITDYASFKESLKESSMAASSSCSSAETATSDTTTTTSNQSEVCAVEDVIENPRLVNVNDKVNDCHKAYVSASPTSRMKQEPKDEAVDHMDTGAGEIQDVGLEGTHDTGQVAENVNKDQMDLSWIDGFDFIDDYLKSFSADELFQVDELLGLIDNNPIDNSVLMQGLDFGQMGFPGDGNPQVDDTPSSFIYQLQNPDAKLLGSLPHMEQTPSGVDYGLDFLKTVESGDYNGGGEEPRFLNLDDDLNPDSNGMQARKDD

SEQ ID NO: 30195 - protein, 280 aa, Glycine max
  Clone ID: TF_GmC122477_1.pep
MSDTHQPFMSVQPPMKLHHPFNPQASSSNFDGDPPCKTAGKTKPPHTKLLRVILTDHDATDSDSSGDDDDPKNPPKHKKVKRQITHITINLPSFSEAPTPAPIPTPSSSSSIDPTRLTLPKKRPAVPRRRSKFRGVRQRPWGRWTAEIRDPNQRKRVWLGTFDTAEEAAAVYDDAALKLKGPNAVTNFPLSAAGKTEHDTAPPEAAFSGEGFSSPTSVLTYFDGDSTPLYGFRYGEVDAFGFDIDAPFSLTDVNLGVLSQRFGKEDFGEFDPDEFLTWPS

SEQ ID NO: 30196 - protein, 252 aa, Glycine max
  Clone ID: TF_GmC280_1.pep
EKVKGCNFFLTNLTTFCNVFSGSVWFSGSSWNSKKIPTLKMGRGGTAAAAVEIAEPGSRPVFFKEPRYRGVRKRPWGRFAAEIRDPLKKARVWLGTFDTAEEAARAYDTAARTLRGPKAKTNFPLSPPFYHPDPFSDHRYFDGAGAGEDFQDHRRPTSSGMSSTVESFSGPRAAVPAKAPVIVNRRYPRTPPVVPEDCRSDCDSSSSVVDDGDGDNVASSFRREPLPFDLNVLPLDDADVATDDLFCTVLCL

SEQ ID NO: 30197 - protein, 275 aa, Glycine max
  Clone ID: TF_GmC319_1.pep
MANAAEVSALNRIKLHLLGELSPLATPLNYFDESNPSPSESSNSQSSSVSLNHYFTDLFEFDSKPQIIDLQTPKTLTSAQKKPQLNRKPSLLIAVPKKTEWIQFGSPDPNPVMAAPENLPQKNHYRGVRQRPWGKFAAEIRDPNKRGSRVWLGTFDTAVEAAKAYDRAAFRLRGSKAILNFPLEVSAVAETVSVAAAEGNVERKRRREEEEVVVEEVKPVVKKEKITEQDVSCFRGMPLTPSMWTGFWDSDVKDIFNVPPLSPLSPFGFSPLVAV

SEQ ID NO: 30198 - protein, 275 aa, Glycine max
  Clone ID: TF_GmC286149_1.pep
MEIQFQQPNLQHQKSGIAITKGGKFKGRSRNNNTNKFAGVRQRPSGRWVAEIKDTTQKIRMWLGTFETAEEAARAYDEAACLLRGSNTRTNFITHVSLDSPLASRIRNLLNNRKGIKKEEDANANANNAPAPRVSTTSSATSTGTSSNSSNGNDNNDQSLSTVTTQSSNLFDDAYKPDLSNCREEFESGHQSNTSWCFGPVFDRFPMAQIFDIPKIDDGLTNAADLDLSEFERMKVERQISASLYAINGVQEYMETVQDSNETLWDLPPLCSLFC

SEQ ID NO: 30199 - protein, 123 aa, Glycine max
  Clone ID: TF_7590215.pep
MVQSRKFRGVRQRHWGSWVSEIRHPLLKRRVWLGTFETAEEAARAYDEAAILMSGRNAKTNFPVGENQIVGNHSSNTSSSSTTTLSAVLSAKLRKCCKSPSPSLTCLRLDTENSHIGVWQKRA

SEQ ID NO: 30200 - protein, 186 aa, Glycine max
  Clone ID: TF_LIB5119-054-A1-PF1-G2.pep
MARPQQRYRGVRQRHWGSWVSEIRHPLLKTRIWLGTFETADDAARAYDEAARLMCGPKARTNFPYNPNEPHSSSSKLLSATLTAKLHKCHMASLSLQMAKQKPPQNKEPQPSHGSNPFASANAIAGSSADTSFRWPDNRHEEFRWLEGNWVGVEGQVEVSNQQFQPVLEDDHIEQMIQELLDYGSI

SEQ ID NO: 30201 - protein, 240 aa, Glycine max
  Clone ID: TF_GmC1399_2.pep
MYGQSSYESDLALLDSIRRHLLGDSEEHKFGAPNVSSGNTPAYSRSSCFSRLYPCLSNDWGELPLKEDDSEDMLLYGVLRDAINAGWVPSLDASSPESFSSGFIPAVTVKSEPDLFPAPEPVYIPPAAQKAEPAVVPAKGKHYRGVRQRPWGKFAAEIRDPAKNGARVWLGTFETAEDAALAYDRAAYRMRGSRALLNFPLRINSGEPEPVRVTAKRASAEPCSSSESGSWVKKRKKVVG

SEQ ID NO: 30202 - protein, 199 aa, Glycine max
  Clone ID: TF_GmC31_1.pep
MATAEEISTLKLLRQYLLGDISDPFLTNLIPVKLEDPSSGLDMGSNFSEQSSFCKFLECFDFEAEVVGLTSHHKVQSSIATSPPQNFNFPEEPMVSMKKEATCYATRHYRGVRRRPWGKFAAEIRDPKKKGSRVWLGTFDTEIDAAKAYDCAAFRMRGHKAVLNFPLEAGMSHPEPNSSGRKRRREYTTAATSSRHVMS

SEQ ID NO: 30203 - protein, 100 aa, Glycine max
  unsure (1)..(100): unsure at all Xaa locations
  Clone ID: TF_6134020.pep
LRGRTDCAAAADVDPTPDQAKETTRFLGERNRPCGRFAAEIRDSRKNQRVWLGTFHSSEDAARSYYTAAHXLRVPKAGCNFLPSYGPTEARPPLSDSALP

SEQ ID NO: 30204 - protein, 296 aa, Glycine max
  Clone ID: TF_GmC56_1.pep
MVEPLNQSTPRTKKMKHKRNPIHDSKMTRKLRIICNDPDATDSSSDEDEYFGNVRKMIEPLEPLERLEVPVNPVVADETSTESTNNDELNQTKRVMAKTPSVKRQSCGKYKGVRMRKWGKWAAEIRDPFKGTRIWLGTFSTAEEASQAYETRRLEFEVMAKALSDEKSNNGSSNNNVVASAETETVAAPENNSSNYYLEMLEMPDLSMLNVPSPSAVAATAAAPSEFELDLLAFVDSEYGFHDEHDFDDDLAALEDFHICGFDDNEPSELPDYDFDDFGADEFAGWIEEPLNIPCV

SEQ ID NO: 30205 - protein, 199 aa, Glycine max
  Clone ID: TF_GmC1684_2.pep
SFCCEKTTEGYGCEKTTEGYGCEKTTEGYGCEKTTEGRTRGTENVKKEEGRRKYRGVRQRPWGKWAAEIRDPFKAARVWLGTFETVEAAARAYDEAALRFRGSKAKLNFPENVTLRQPQFTVSTSTDPFQLSGTNLYDHRMFLTSNTMASHHLQSSLPLPPATSSSLTSPPQNITSLSSLYSAQLPPWSASGHSSSSSP

SEQ ID NO: 30206 - protein, 179 aa, Glycine max
  Clone ID: TF_GmC78516_1.pep
MARPQQRYRGVRQRHWGSWVSEIRHPLLKTRIWLGTFETAEDAARAYDEAARLMCGPKARTNFPYNPNEPLSSSSKLLSATLTAKLHKCHMASLSLQMSKQKQSQTEPHQGSSSDSGNAIAGTSSDNTGFRWPEEEAQVEVPPAQQQQFQPVLQDDHIEQMIQELLDYGSMELSFVDSA

SEQ ID NO: 30207 - protein, 256 aa, Glycine max
  Clone ID: TF_GmC1816_2.pep
LLPPHPSFSTYTPSAYLLENQERIEGVEEQPSSLLGLNHLSTSQISQIQAQAQAQNSLSLNFLGPKPVPMKHVGGPAKPTKLYRGVRQRHWGKWVAEIRLPKNRTRLWLGTFDTAEEAALAYDKAAYRLRGDLARLNFPNLKGSCPGEEYKPMQAAVDAKLDAICANLAEMQKQGKNEKGARSGKKSKQGPNLEAKPEPEASGSGAAALSPESEGSADSSALSDLTFDVTEPQWEDASAHFNLQKFPSYEIDWDSL

SEQ ID NO: 30208 - protein, 206 aa, Glycine max
  Clone ID: TF_uC-gmflLIB3275P137g09b1.pep
PLGFDAWASGRWVAEIKDSSQHVRLWLGTYDTPEEAARAYDEAARALRGENARTNFAPVSQLVNGQLGQQSGFNNNNNLLSTGSDIGKHGLSFASLKAKLSKNLQNIMARASDHNNNNNNKSSKSRVSDHFTFASIFHRRSYQIPEGDMMKNIEKVVQPSIIVPPMEQSGGDYNSCVANWESASSVSDCSSEWVGFGNNNSKPRLE

SEQ ID NO: 30209 - protein, 214 aa, Glycine max
  Clone ID: TF_GmC2485_24.pep
MHMLVKNHNKGDGSKSLADTLAKWKEYNAWLESNNEAEKPARKVPAKGSKKGCMKGKGGPENSRCNYRGVRQRTWGKWVAEIREPNRGSRLWLGTFPTAISAALAYDEAARAMYGSCARLNFPNVQVSTLSEESSRNSPAAANRSRNSPAASQSGHALMILESSECMILPNNSGGDAAEDDDMEDLSLSLSVKRVKHEEGEDESGTSSSYLSLS

SEQ ID NO: 30210 - protein, 195 aa, Glycine max
  Clone ID: TF_GmC6701_1.pep
MSSHALNTNVNALDHFEIPVTTPFQDVSASVPSIAAFCRSSSFRNIFLTENWAELPLKENDTNDMVIYGALRDAAATGWFPANGNEVSNVSVAVKMENEGQNSKTTAARGTRTPPKKGLSYRGVRRRPWGKYAAEIRDTKRNGVRVWLGTYETAEDAALAYDRAAFKMRGSKAKLNFPHLIGSDHEPIKVTLKKH

SEQ ID NO: 30211 - protein, 300 aa, Glycine max
  Clone ID: TF_GmC400_1.pep
MCGGAIIADFIPRRGGRRLTASELWPNSFAKDDDFDLDYSHIATQQPSTLKRSQPPKVSEQVENKPVKRQRKNLYRGIRQRPWGKWAAEIRDPRKGVRVWLGTFNTAEEAARAYDREARKIRGKKAKVNFPNEDDEYSIQARNPIPPLPFAPQHPPLYQQQYRCDLNNAPKNLNFEFGYDLNHAEAFPSRVDAVNADSVVVSVDENSGSASGSEGAYSTTEFMGSVQNGNGYLGGTVMEKKEKETEVIEAEEEKNKVLELSEELMAYENYMKFYQIPYYDGQSTTNNVQESLVGDLWSFD

SEQ ID NO: 30212 - protein, 304 aa, Glycine max
  Clone ID: TF_GmC400_2.pep
MCGGAIIADFIPRRGGRRLTASELWPNSFGKDGDFDFDYSHIADQQRSTLKMSPPPKASEQVENKPVKRQRKNLYRGIRQRPWGKWAAEIRDPRKGVRVWLGTFNTAEEAARAYDREARKIRGKKAKVNFPNEDDEYSIQARHPIPPLPFTPQTQNPPLYQQQYRCDLNIAPKNLNFEFGYDLNHAGAFPSHVDAVNADSVVVSGDENSGLASGSEGAYSTTEFMGSSQNGNGYLGVTAMEKNEKETEVIEAQEEKNKVQELSEELMAYENYMKFYRIPYYDGQSTAPPNNVQESLVGDLWSFD

SEQ ID NO: 30213 - protein, 278 aa, Glycine max
  Clone ID: TF_GmC319_2.pep
MANAAEVSALKRIKLHLLGELSPLATPQNKFDQTNPSPSESSNSESSSISLNHYFTDLLEPEIEFPLFEFDSKPQVIDLETPKTLISAEKKPQFNRKPSLLIAVPKKTEWIQFGNPEVAAPENQPEKKHYRGVRQRPWGKFAAEIRDPNKRGSRVWLGTFDTAIEAAKAYDRAAFRLRGSKAILNFPLEVNTAAETVSVAAVDVERKRRREEEEVVVEDVKAVVKKEKITEHDVSCFRGMPLTPSMWTGFWDSDVKDIFNIPPLSPLSPFGFSPLVAV

SEQ ID NO: 30214 - protein, 211 aa, Glycine max
  unsure (1)..(211): unsure at all Xaa locations
  Clone ID: TF_GmC2485_15.pep
MHMLVKNHNKGDGSKSLADTLAKWKEYNAWLESNNEAEKPVRKVPAKGSKKGCMKGKGGPENLRCNYRGVRQRTWGKWVAEIREPNRGSRLWLGTFXTAISAALAYDEAAMAMYGFCARLNFPNVQVSTFSEEPSRNSPAAAYQSRNSPSAKESGSALVILERSECMMLWNNSGGDAAEDDGMEDLSLSLSVKHEEGEDESGTSSSYLSLS

SEQ ID NO: 30215 - protein, 255 aa, Glycine max
  Clone ID: TF_GmC1772_1.pep
MNILGQSLHQSNNGSYSCSSPETANSSNLPTTPKAVHSDEEVNTLASAHPKKRAGRRIFKETRHPVYRGVRRRNNNKWVCEVRVPNDKSTRIWLGTYPTPEMAARAHDVAALSLRGKSACLNFADSAWRLPLPASTNAKEIRRVAAAAAVAIAAEDSRGKQLRTNAIDAVADCEVSSSDIGVDENCNNNKASQRFCDLDEITMPDAPVFEDMHEWLQTMAAEPLRSPTFVTYVNVRDVWNFVEDDAEVSLWSFTV

SEQ ID NO: 30216 - protein, 205 aa, Glycine max
  Clone ID: TF_GmC268_1.pep
MAKEKKNLSNKNKKPSNADEVHFRGVRKRPWGRYAAEIRDPGKKTRVWLGTFDTAEDAARAYDVAARNFRGPKAKTNFPFLPDNNTNVNLNKKNNNVNVKSDSPSQSSTVESSTPEREFTRRAAPAAMDRFPFLPIQQQILVTHPVAPMRPVYFLDRAHFMTQPFPLRFEPGPVQSDSDSSSVVVDCQPKRELNLDLNLAPPNEY

SEQ ID NO: 30217 - protein, 195 aa, Glycine max
  Clone ID: TF_GmC28_2.pep
MSQTTATTTTIATTMYNNNQVSSSSFSSDETNNTKDDKHYRGVRRRPWGKYAAEIRDPNRKGSRVWLGTFDTAIEAAKAYDKAAFKMRGSKAILNFPLEIGSDQSKEESSSSSSSVSSSSIVIKVGVKREREEESERKNNYEKSEFNNNSNSNKHVKKEECPLTPSCWKGFWDTDVMGTIFSVPPLSPLSPLMVV

SEQ ID NO: 30218 - protein, 343 aa, Glycine max
  Clone ID: TF_GmC1839_1.pep
MLDLNLNADSASDLQMESSGSFNSSVVNAADTDDSCSYGDAVAYNFAILNNAATSDGLPLGAAGEPSVRTIQLFPAADSGASAPLLLDFSSKVDQHGAPPEQRITPRQQQVKKSRRGPRSRSSQYRGVTFYRRTGRWESHIWDCGKQVYLGGFDTAHVAARAYDRAAIKFRGVDADINFNVSDYDEDIKQMSNFTKEEFVHILRRQSTGFSRGSSKYRGVTLHKCGRWEARMGQFLGKKYIYLGLFDSELEAARAYDKAAIKCNGREAVTNFEPSLYEGDVSSSRAKLGMASPRSLWQGNSCSTLLYCSIIRIPFNNNTISCGYSNSFSKHDIPPLAFSIINH

SEQ ID NO: 30219 - protein, 177 aa, Glycine max
  Clone ID: TF_GmC4678_8.pep
MEGEGRRREGGERETATAAATRKVVEGADQRRYKGIRMRKWGKWVAEIREPNKRSRIWLGSYSTPVAAARAYDTAVFYLRGPSARLNFPELLIGEGAAALTGGCDMSAASIRKKASEVGARVDALQATLHHHHHHVVPPRQLLSASCGGGSGDFAVRVVDLNKMPEPESSDCEWNVN

SEQ ID NO: 30220 - protein, 96 aa, Glycine max
  unsure (1)..(96): unsure at all Xaa locations
  Clone ID: TF_uC-gmroLIB3259P225d12b1.pep
SYSWPTGVVPATAFICGTSGCSVLVSHGFSCAATISDLSVSQGHDAYGVSCSRSLPCGLFLVLGGVAAGKLRFSPLQCQKLRLRLYKKYVIXDAWV

SEQ ID NO: 30221 - protein, 97 aa, Glycine max
  Clone ID: TF_GmC6107_7.pep
DVRNYRVPLCVLNGHGYAVRKVKFSPHVRNLMVSCSYDMTVCVWDFMVEDALVSRYDHHTEFAVGVDMSVLVEGLMASTGWDELVYVWQHGTDPRAP

SEQ ID NO: 30222 - protein, 232 aa, Glycine max
  Clone ID: TF_GmC700_2.pep
GSSSSRIGSRAELPSSEASSSASTRKHSHSVYRGVRMRAWGKWVSEIREPRKKNRIWLGTFATAEMAARAHDVAALAIKGNSAILNFPELASSLPRPDSNSPRDVQAAAAKAAAMEVNDAPTTPTSSSSASLSQSSSWSSLAVSSSSGEDPSTPEELGEIVELPSLGTSFEIPDPSGELVFFDPWPYSQAWSHGIYDESESYFFGDQISMQDSETESMVLCGFAFEASLWQH

SEQ ID NO: 30223 - protein, 260 aa, Glycine max
  Clone ID: TF_GmC130895_1.pep
MHPINTGDDSTLSSPIPQYGQISNSCLIETQDPSLQPLNQGGNGRKRHYRGVRQRPWGKWAAEIRDPKKAARVWLGTFDTAEAAAAAYDAAALKFKGSKAKLNFPEHVLLPPPPISSSSPPCNNNNNHHSYYYGSSALAPLAPPPQHVYDQTPPPQQQPLLSSSAQEEGFPNLMQYAQLLWSRDDDDLQRIASGLHQHHHHNEAFYDSSSSTLFSSTSTTYSMTVSDQQQNIGDDTSTPMGAEYNYGGCFFRGSDFHDKN

SEQ ID NO: 30224 - protein, 123 aa, Glycine max
  unsure (1)..(123): unsure at all Xaa locations
  Clone ID: TF_13252405.pep
EPRGRSFFFSFHPINGASDSTPSTPPSGISNSCLIETQDPSQQPLIQGIGRKRHFIGVRQRPWXLWAAEFRDPKKAAXVWLGSFDTAXAAAAASXAAAXKFIGSXANLNFPEHVLVPPPPFPS

SEQ ID NO: 30225 - protein, 169 aa, Glycine max
  Clone ID: TF_GmC1684_4.pep
SVRPRVRPRVRPRVRREDDRRGGKWAAEIRDPFKAARVWLGTFDTAEAAARAYDEAALRFRGNKAKLNFPENVTLRQPQFTVSNPPSSLVSITTSIDPVVHSTRPLLLPSQASTATNVYEYFQLSGFPTNTNLYDGNRMFVTSNAMASHHLQSSSSLLASSSSAFGSSV

SEQ ID NO: 30226 - protein, 192 aa, Glycine max
  unsure (1)..(192): unsure at all Xaa locations
  Clone ID: TF_GmC152_1.pep
MCGGAIISDFIGVKRGRNLAAQELWSELDPFSDFLGFDTTNSKNQPPLQKIPDKKVVSSCEKKKKSVVGAEKKKSDSGRARKNVYRGIRQRPWGKWAAEIRDPHKGVRVWLGTFPTAEEAAQAYDDAAIRIRGDKAKLNFPATXFPPPPLRHLPKSNAASALTPSLNKAAAAAHNPPLDPPANAAGGKTNST

SEQ ID NO: 30227 - protein, 192 aa, Glycine max
  unsure (1)..(192): unsure at all Xaa locations
  Clone ID: TF_GmC152_3.pep
MCGGAIISDFIGVKRGRNLAAQELWSELDPFSDFLGFDTTNSKNQPPLQKIPDKKVVSSCEKKKKSVVGAEKKKSDSGRARKNVYRGIRQRPWGKWAAEIRDPHKGVRVWLGTFPTAEEAAQAYDDAAIRIRGDKAKLNFPATXFPPPPLRHLPKSNAASALTSSLKKAAAAAHIPPLDPPAKAAEETTNST

SEQ ID NO: 30228 - protein, 237 aa, Glycine max
  Clone ID: TF_GmC28_1.pep
MQSSISQSEICITDYLLPQEVPSQFQFPDMSNNNIPMNHTNLQMPQITSFSKPPRSSSNLSNRKPSLRNITIPSITSDETNNIKENKHYRGVRRRPWGKYAAEIRDPNRKGSRVWLGTFDTAIEAAKAYDKAAFKMRGSKAILNFPLEIGESEESVSSCIKVGVKREREEESKSNNYEKSEFNNNNNSNKHVKKEECSPKAVCPLTPSCWKGFWDTDVMGTIFSVPPLSPLSPLMVV

SEQ ID NO: 30229 - protein, 370 aa, Glycine max
  Clone ID: TF_GmC1051_1.pep
MAKKSQLRTQKNNVTTNDDNNLNVTNTVTTKVKRTRRSVPRDSPPQRSSIYRGVTRHRWTGRYEAHLWDKHCWNESQNKKGRQVYLGAYDNEEAAAHAYDLAALKYWGQDTILNFPLSNYLNELKEMEGQSREEYIGSLRRKSSGFSRGISKYRGVARHHHNGRWEARIGKVFGNKYLYLGTYATQEEAATAYDLAAIEYRGLNAVTNFDLSRYIKWLKPNNNTNNVIDDQISINLTNINNNNNCTNSFTPSPDQEQEASFFHNKDSLNNTIVEEVTLVPHQPRPASATSALELLLQSSKFKEMMEMTSVANLSSTQMESELPQCTFPDHIQTYFEYEDSNRYEEGDDLMFKFNEFSSIVPFYQCDEFES

SEQ ID NO: 30230 - protein, 242 aa, Glycine max
  Clone ID: TF_GmC320890_1.pep
MDLDFDSTFFLNQNLSFFPENSSIFGDTFSWDYNFVLDDIFNNLSDNSSQSQTKETSSASNVSSCIGSVELQEVSSNTTYKEVKKVRPPPPSPPLPSQQVAKEPRMYRGVRKRPWGKFAAEIRDSTRNGVRVWIGTFDTAEAAALAYDQAAFSTRGSLAVLNFPEEVVRESLKDMPSKPWEEGSSPVLALKRKHTMRTKSNSKKKTKVDQREQLDFSRTSQNVLVFKNLGAEYLKQLLTLTS

SEQ ID NO: 30231 - protein, 49 aa, Glycine max
  unsure (1)..(49): unsure at all Xaa locations
  Clone ID: TF_701207375H1.pep
AKTKKNNQYRGIRQHAWGKWAAEIRDPRXGVRVWTGTFSTAEEAARCCD

SEQ ID NO: 30232 - protein, 557 aa, Glycine max
  unsure (1)..(557): unsure at all Xaa locations
  Clone ID: TF_GmC1595_1.pep
IRLEAVSKEPNSTSKPHNNLSLTFIKNTHHXSCSSPPNNNSLAFSLSNHFPNPSSSPLSLFHSFTYPSLSLTGSHTADAPPEPIAGGGATNLSIFTGAPKFEDFLGGSSATATATTCAPPQLPQFSTDNNNHLYDSELKTTIAACFPRAFAAEPTTEPQKPSPKKTVDTFGQRTSIYRGVTRHRWTGRYEAHLWDNSCRREGQSRKGRQVYLGGYDKEDKAARAYDLAALKYWGPTTTTNFPISNYEKELEEMKNMTRQEFVASLRRKSSGFSRGASIYRGVTRHHQHGRWQARIGRVAGNKDLYLGTFSTQEEAAEAYDIAAIKFRGLNAVTNFDMSRYDVKSIANSTLPIGGLSGKNKNSTDSASESKSHEASRSDERDPSAASSVTFASQQQPSSSTLSFAIPIKQDPSDYWSILGYHNSPLDNTGIRNTTSVTATSFPSSNNGTTSSLTPFHMEFSNAPTSTGSDNDAAFFSGGGIFVQQQSGHGNGHGSGSSGSSSSSLSCSIPFATPIFSLNSNTSYENSAGYGNWIGPTLHTFQSHAKPSLFQTPIFGME

SEQ ID NO: 30233 - protein, 144 aa, Glycine max
  Clone ID: TF_GmC135444_1.pep
MKTNNNVSGERKSRKRRNGGSDYVEDTLEKWKEYNRQQQLGSRENGVEVIHKAPAKGSRKGCMRGKGGPQNSDCKFRGVRQRIWGKWVAEIREPINGKLVGEKANRLWLGTFSTALEAALAYDEAAKALYGPCARFEFFRVNRL

SEQ ID NO: 30234 - protein, 211 aa, Glycine max
  Clone ID: TF_GmC289_2.pep
MRRGRATAAVVDPTAEQAKETRFRGVRKRPWGRFAAEIRDPWKKQRVWLGTFDSAEDAARAYDKAARSFRGPKAKTNFPSFPGPTDHHSSQQIPPLYQAHGLSTKFEPAQVNRPTTSGMSSTVESFSGPRVPPSSSSSRKPLVVVNPIIPLDDDDDDCHSDCDSSSSVVDDQDCVLTSSFRQPLPFDLNLPPPDAAYDDDDDDVPATALCL

SEQ ID NO: 30235 - protein, 254 aa, Glycine max
  Clone ID: TF_GmC1733_1.pep
MVKPAMASVDSSSFSSCKNDSFSSNYSIDTCKMYKGVRKRKWGKWVSEIRLPNSRERIWLGSYDTQVKAARAFDVALYCLRGKSASFNFPDTPRHLEINMVLPCDIQQQPLSHPEIQEIASKFANNDHVPLEEESAFQEQEQDPSMESQSDESKSANTITEMSNFPNIYDGGTHTNVQVDQLQGDWDSMDWTFFNMLDDLNGSDFGLYLGPDKLHPGEFLCPTQAPMLFHEDEIEGDDDHDAFSNHSLLWSWNF

SEQ ID NO: 30236 - protein, 252 aa, Glycine max
  Clone ID: TF_GmC1447_1.pep
WGTTTTTNFPISHYEKELEEMKHMTRQEYVASLRRKSSGFSRGASIYRGVTRHHQHGRWQARIGRVAGNKDLYLGTFSTQEEAAEAYDVAAIKFRGLSAVTNFDMSRYDVKSILESTTLPIGGAAKRLKDMEQVELSVDNGHRADQVDHSIIMSSHLTQGINNNYAGGGTATHHNWHNAHAFHQPQPCTTMHYPYGQRINWCKQEQQDNSDAPHSLSYSDIHQLQLGNNGTHNFFHTNSGLHPNVEHGFCFH

SEQ ID NO: 30237 - protein, 185 aa, Glycine max
  Clone ID: TF_GmC6851_1.pep
MVQTKKFRGVRQRQWGSWVSEIRHPLLKRRVWLGTFETAEAAARAYDQAAILMNGQNAKTNFPTSKNQAEADDNNNTDTFLSPKALSELLSTKLRKYCKDPAPSLTCLRLDADNSHIGVWQKGAGPHSGSNWVMRLELGKKQITEEGSESTESPQSSTNGATENNEVEEEDRVALQMIEELLNWN

SEQ ID NO: 30238 - protein, 199 aa, Glycine max
  Clone ID: TF_GmC320_1.pep
MMVKPSSEKPEEHRDSKYYKGVRKRKWGKWVSEIRLPNSRQRIWLGSFDTPEKAARAFDAAMFCLRGRNAKFNFPDNPPDIAGGESMTPSQIQVAAAQFANAGPHEGHSGRPEHSPMQSLSPSVSEGTVLTDSDVTTLNGSLTDLFTPVGSSGYASDYGIFPGVDDFSGGFYVPEMLNFNYGEENGEGFIVDESFLWNF

SEQ ID NO: 30239 - protein, 195 aa, Glycine max
  Clone ID: TF_GmC288383_1.pep
MARPQQRYRGVRQRHWGSWVSEICHPLLKTRIWLGTFETAEDAARAYDEAARLMCGSKARTNFPYNPNEPHSSSSKLLSATLTAKLHKCHMASLSLQMAKQKPPQSKEPQPSHGSSNPFAFANVIAGSSADTGFRWPDNRHEEFRWLEGNWVGVEGQVEVSHQQFQPVLEDDHIEQMIQELLDYGSIELCSVGLT

SEQ ID NO: 30240 - protein, 193 aa, Glycine max
  Clone ID: TF_700943089_FLI.pep
SKRIRGDKAKLNFPATAPPPSKKVVSSCEKKKKKSVSAEKKSGGRARKNVYRGIRQRPWGKWAAEIRDPHKGVRVWLGTFPTAEEAARAYDDAAKRIRGDKAKLNFPATAPPPSKKQRCLSPDTTTEQSSSSQSTTGSTGSPPSAAFHGGGDELDLKQLERFLGLDNMGAEWDNMDDLWMLDDVVVPNRHLIY

SEQ ID NO: 30241 - protein, 223 aa, Glycine max
  Clone ID: TF_GmC152_2.pep
MCGGAIISDFIGVKRGRNLAAQELWSELDPFSDLLGFDTTTTTTNQPPLPDKKVVSSCEKKKKKSVSAEKKSGGRARKNVYRGIRQRPWGKWAAEIRDPHKGVRVWLGTFPTAEEAARAYDDAAKRIRGDKAKLNFPATAPPPSKKQRCLSPDTTTEQSSSSQSTTGSTGSPPSAAFHGGGDELDLKQLERFLGLDNMGAEWDNMDDLWMLDDVVVPNRHLIY

SEQ ID NO: 30242 - protein, 183 aa, Glycine max
  Clone ID: TF_GmC5876_1.pep
MGSNKTYEEEESTVLFSHSQTQTELLPFNENDPQDMVIYQVLNEANALTNTFLPQRLHQPQLCLEPTRNITKKHYRGVRRRPWGKYAAEIRDSARHGARIWLGTFQTAEEAAMAYDRAAFKMRGSKALLNFPAEIVAATELSFNNTNSNNHDAVSDSSAGSSCTNNSVQLNRNQSESCTSSTG

SEQ ID NO: 30243 - protein, 157 aa, Glycine max
  Clone ID: TF_GmC5876_2.pep
MGSKKTYEEEESTALFSHSQTQTDLLLPFNENDPQDMVIYQVLHEANALTNTFLPQPTRNITKKHYRGVRRRPWGKYAAEIRDSARHGARIWLGTFQTAEEAAMAYDRAAFKMRGSKALLNFPAEIVAAATATELSFKSSSNNNNNNNNNNPDAVSD

SEQ ID NO: 30244 - protein, 323 aa, Glycine max
  Clone ID: TF_GmC1763_1.pep
MTTFMDMYNTTSSIMTPDFLDQCSDQELMKALEPFMKSDSSSTTSSSITTYPSFSSFSSSPNLSSTTWSTQFCSSSYHQKGPTPTQASSFKLNQLTPSQIFQIQAQIQVPRGQFLSPKPIPMKHVRASPSSKPTKLYRGVRQRHWGKWVAEIRLPKNRTRLWLGTFDTAEEAALAYDNAAFKLRGENARLNFPHLRHHGARAYGEFGNYKPLPSAVDAKLQAICQSLGTKLQKLKTQNPIVLDTHKAETETSEFQDFNKVENYQTSSSSALSDEYSSSSSSSSPESDITLLDFSDSCETIDNLGLDLEKYPSVEIDWAALSDS

SEQ ID NO: 30245 - protein, 98 aa, Glycine max
  unsure (1)..(98): unsure at all Xaa locations
  Clone ID: TF_LIB3056-008-Q1-N1-G5.pep
MANEKNHLDNTNMMPCNADEAHLRGVQKRPWGRYADEIRDPGKKTRVWLGTFDTDEDAXRAYDVTVRNFRGPXVKTNFPLLPDNNINVNLNMKSNNVY

SEQ ID NO: 30246 - protein, 401 aa, Glycine max
  Clone ID: TF_GmC326_1.pep
MDAISCMDESTTTESLSISLSPTSSSEKAKPSSMITSSEKVSLSPPPSNRLCRVGSGASAVVDPDGGGSGAEVESRKLPSSKYKGVVPQPNGRWGAQIYEKHQRVWLGTFNEEDEAARAYDIAAQRFRGKDAVTNFKPLAGADDDDGESEFLNSHSKPEIVDMLRKHTYNDELEQSKRSRGVVRRRGSAAVGTASSISGACFTKAREQLFEKAVTPSDVGKLNRLVIPKQHAEKHFPLQSSNGVSATTIAAVTATPTAAKGVLLNFEDVGGKVWRFRYSYWNSSQSYVLTKGWSRFVKEKNLKAGDTVCFHRSTGPDKQLYIDWKTRNVVNNEVALFGPVGPVVEPIQMVRLFGVNILKLPGSDTIVGNNNNASGCCNGKRREMELFSLECSKKPKIIGAL

SEQ ID NO: 30247 - protein, 218 aa, Glycine max
  Clone ID: TF_GmC1209_1.pep
SDNKKKKYKGVRMRSWGSWVSEIRAPNQKTRIWLGSYSTAEAAARAYDAALLCLKGSSANLNFPSSSSSSQHYIIPQDTAMMSPKSIQRVAAAAANNFLDNNAIAINNATTPPSPPLASTSSSFVSSPSMSSSSPLDQIDDDVSLLTPFGAYTTTTATTICDETNESMAMMESWYDLEGLQSPKYVDQMLSGAFFDIDSTQLLDDLYEESDIRLWSFC

SEQ ID NO: 30248 - protein, 202 aa, Glycine max
  Clone ID: TF_GmC8074_1.pep
MVSATVDSDFAFLESVQQYLLGHDSINLMSETHQAASHDPFSDPNKCDGDSGNIAFRSEDATAVVARDHAPPTWKHYRGVRRRPWGKFAAEIRDPKKNGARVWLGTYDTEEKAALAYDKAAFKMRGQKAKLNFPHLIDSDNSDELSEPVMMTTSKRSLLEISSPSSSCSDDSSESQGTKRRKSLAELLNKLAKNRSQVKVEC

SEQ ID NO: 30249 - protein, 142 aa, Glycine max
  Clone ID: TF_GmC120748_1.pep
MDSQSETQQLAVPKMEDFYFGDHQQDLKAMIVPGFKALSGTNSGSEVDDSTSNKTVTRVAPAALGGAHSGESNCKGSALTLCDVAANGSDDSNNKAVVAVGFDTRKKVAHTFGQRTSIYRGVTRHRWTGRYEAHLWDNSCRR

SEQ ID NO: 30250 - protein, 87 aa, Glycine max
  unsure (1)..(87): unsure at all Xaa locations
  Clone ID: TF_LIB4281-010-R1-K1-F12.pep
VFAFIECRDCGKQVYLGGFDTAQAAARAYDRAAIKFRGVEADINXSLSDYEEDXKQMRGLSKEEVVLLLRRQINGSSRSSTYKGALA

SEQ ID NO: 30251 - protein, 240 aa, Glycine max
  Clone ID: TF_GmC995_9.pep
TDSSEDETEKVQSPRRVKRNVSEISLPPLPPPFTTTPETSSCQPQSKKRVLTHPPSTRRNTSGKFRGVRQRKWGKWAAEIRDPFQSTRIWLGTFNTAEEASQAYEARRLEFEAMAEAQAYKTSSVSEPLATISDNKSNCCNSSAAAISAAAVSAADVSVSEKFSTTFDDLEESPNFGLDFDWLSFNDYGQGFDDFGGLEDIHIGGFDDNEPTELPDFDFGDFGADEFAGWIEEPLNIPCA

SEQ ID NO: 30252 - protein, 99 aa, Glycine max
  unsure (1)..(99): unsure at all Xaa locations
  Clone ID: TF_jC-gmX3056002C06sg22N22a1.pep
MAEVHCEGKNYKGVRMRKWGKWGCLIRLPNRRQRIWTGSYNTAETAARGXHAVMLWSRGRSAQFNFPDYPPDMAGGTLMTPKQRQMAAEQFANTGPHQG

SEQ ID NO: 30253 - protein, 90 aa, Glycine max
  Clone ID: TF_GmC6107_8.pep
MSLFLLRFLHFSNYIKGSTTAKSVAFQVRAEKFANRKRKNQYRGIRQRPWGKWAAEIRDPRKGVRVWLGTFNTAEEAARAYDAEARKIRG

SEQ ID NO: 30254 - protein, 185 aa, Glycine max
  Clone ID: TF_GmC112_1.pep
MQKRRAGRKKFHETRHPVYKGVRQRNGKWVSELRQPNNKNARVWLGTFAHPDMAAIAYDVAALAFKGDSASLNFPNAATSFPRLNSRTCSVRAIQFAATQAAEKHFSCVESQQLQREGSGSGSFSLDDDSSEFSSQGRFFWDEEEVFNMPELLNCMAEALIITPPALERGFNWVGGETTVDLTLW

SEQ ID NO: 30255 - protein, 163 aa, Glycine max
  Clone ID: TF_16347094.pep
VASLASSSARPKFPNLTLFLPEPSMVYSSISSSNIKGGEVMSATSDPSYHVSQFGQNQHQAGSGDAHKMNNNLTNSRSKSFNENWLSATRTQPLKYGGRGKLFKGVRQRHWGKWVAEIRLPTNRTRVWLGTFDSAEDAAIAYDTAAYILRGEYAQLNFPELSM

SEQ ID NO: 30256 - protein, 346 aa, Glycine max
  Clone ID: TF_GmC6807_1.pep
MKNNRDKEKGNDVDQSYRQHHTLSMPMMFSGLNREKEMSAMISALTHVVCGEDEHHGADYSLLNHNINNTNSAVVGDDDFTVTSNMASGSMPPSSTCSSQGGNSVLKRRREYDNTNDFSRGGSFPAISTIAESSSTVTRRTANTVYDYEYRTENVKVVEEEPRRKYRGVRQRPWGKWAAEIRDPFKATRVWLGTFETAEDAARAYDQASLRFRGNKAKLNFPENVRLRQQQEPPLNLNPPPPPNHGAILSIPSTTVHTEALQGSLGSSNFYEHSYSHLHEFPVSLYDQIAESTSTTMASHHLQFLPPASSSTMTMTSPQAPPSIYPTHPAAWSSGYSYNSSSSASG

SEQ ID NO: 30257 - protein, 310 aa, Glycine max
  Clone ID: TF_GmC1423_1.pep
CVTSSPAITNTVATDTKKRGLQMVDQNQKQIGHRKSIDTFGQRTSQYRGVTRHRWTGRYEAHLWDNSCKKEGQGRKGRQVYLGGYDMEEKAARAYDMAALKYWGPSSHINFPLENYQNELEEMKNMTRQEYVAHLRRKSSGFSRGASMYRGVTRHHQHGRWQARIGRVAGNKDLYLGTFSTQEEAAEAYDIAAIKFRGVNAVTNFDITRYDVEKIMESNNLLSSEQAKRKREMDDGTRSEATVNQKPSTTQETVLMQKRCRSQSEWKMVQFPSSQQLDQYPQRIEGCRTQPFSTALDNMFLKQVERKRRT

SEQ ID NO: 30258 - protein, 147 aa, Glycine max
  Clone ID: TF_GmC1388_2.pep
MAPRDINRSNVVVVAGVSNPTHKEIRYRGVRKRPWGRYAAEIRDPGKKTRVWLGTFDTAEEAARAYDTAAREFRGTKAKTNFPTHAAAARSPSQSSTLDSSSAPPLDLTLAGPLTAAGALVFSGGASRGVLRRFCACRGARVVRSCR

SEQ ID NO: 30259 - protein, 109 aa, Glycine max
  unsure (1)..(109): unsure at all Xaa locations
  Clone ID: TF_jC-gmle01810047f08a1.pep
LLLWRRGIIPQATLSVNGNGNSGLKEEHFRGVRKRPWGRYDAEIRDPGEKSRVXLGTFEHRGLMQPRVYDAGARELCGHTANDNTSLRPWENVKNSSHIQSRTEQSFSR

SEQ ID NO: 30260 - protein, 114 aa, Glycine max
  Clone ID: TF_21994429.pep
MVEPPAAAATSESDTTGNTNTPSPSSSSSSSSSKKRARDNNNNSNSSSNKHSVYRGVRMRTWGKWVSEIREPRKKNRIWLRNVAHTQMAARAHDVGALKIKGSPAFFNFPKLGA

SEQ ID NO: 30261 - protein, 226 aa, Glycine max
  Clone ID: TF_GmC945_1.pep
MNIFKSPLDHDLNCGGIFHDSAEASYSSETRSTPSDEEVILASARPKKRAGRRVFKETRHPVYRGVRRRNKNKWVCEMRVPNNNSRIWLGTYPTPEMAARAHDVAALALRGKSACLNFADSRWRLTVPATTNAEEIRRAAGEAAEAFAVADGDDVNIEQQQSVMATNDDEVQEPLQQEEVQDLHDLLLSIANEPLMSPPPCARDGRDWNDVDIFDDDEISLWNFSI

SEQ ID NO: 30262 - protein, 416 aa, Glycine max
  Clone ID: TF_GmC1811_1.pep
MAMFDLNVDINHCDADADSSCDQKGLVLQSFPPEISDSRTSSSSVWNPVEEDSSNNSSPLIFDILKKERDESEFDAATERVNKEQNMAPQEAEIVARTLFPVTAAVDKGVRVPDFKLGLWGKTECLNLSLPEPDGQNGLRTLQQKVPPVRKNRRGPRSRSSQYRGVTFYRRTGRWESHIWDCGKQVYLGGFDTAQAAARAYDRAAIKFRGVDADINFSLSDYEEDLKQMRNLSKEEFVLLLRRQINGISRRSSTYRGALALRKDAQGEPRMGPFVGMTCYPKPSINCDDGKAEASFKPCSYKGEIIVNSNMTGTCHNLDLSLGISPSSKRLKNNDYSGGYSFGCMTCKIPEERGPMEKVMVDRIKNVPLQKISNLAWQLCSNGSIVPRPFQPNAASSGFVSSSSCLITRTSNQHTY

SEQ ID NO: 30263 - protein, 147 aa, Glycine max
  Clone ID: TF_GmC1707_1.pep
MEGEEGGIATKKRGKEGETETTRYKGIRMRKWGKWVAEIREPNKRSRIWLGSYSTPVAAARAYDTAVFHLRGPSARLNFPELVAAEGPAADMSAASIRKKATEVGARVDALHRQHPHALPAGEFADRVDLNKMPEPENSDCDYWDRD

SEQ ID NO: 30264 - protein, 62 aa, Glycine max
  Clone ID: TF_LIB4167-012-R1-N1-B8.pep
HILLSNIGTQEKTAHAYDITAIEYRGIHAVTNFDLSTYIKRLKPSGGGTPKANLESHAGLEH

SEQ ID NO: 30265 - protein, 409 aa, Glycine max
  unsure (1)..(409): unsure at all Xaa locations
  Clone ID: TF_GmC6107_1.pep
MSLFLLRFLHCSNYIKGSAKTKALLLHRLAEDRLFLFSYSSIFPPLGTDAFVILRVLLCFSSEMCGGAIISDFIPAAAIAGSRRLTADYLWPDLKKRKSDLDVDFEADFRDFKDDSDIDDDDDDHQVKPFAFAASSRLSTAAKSVAFQGRAEISANRKRKNQYRGIRQRPWGKWAAEIRDPRKGVRVWLGTFNTAEEAARAYDAEARRIRGKKAKVNFPEAPGTSSVKRSKVNPQENLKTVQPNLGHQSSVLATITWXLVEQKPLVXQYANMASFPGSGNGLRSLPSSDDATLYFSSDQGSNSFDYAPEISSMLSAPLDCESHFVQNANQQQPNSQNVVSIEDDSAKTLSEELVDIESELKFFQMPYLEGSWGDTSLESLLSGDTTQDGGNLMNLWCFDDIPSMAGGVF

SEQ ID NO: 30266 - protein, 254 aa, Glycine max
  Clone ID: TF_GmC1772_2.pep
MNILGQSFNESNNGSYSCSSPETGSSSNIPNTFHSDEEVHTLASARPKKRAGRRIFKETRHPVYRGVRRRNNNKWVCEVRVPNDKSTRIWLGTYPVPEMAARAHDVAALALRGKSACLNFADSAWRLPLPASTNAKEIRRVAAAAAVAIAAEDSCGEQLQNSIVNDAVADDCEVSRSDVSFDEDSNSNKGLRVFCDLDEITMADAPVFEDMREWLQSMADEPLRSPTFVTYVNVRDVWNFVEDDAEVSLWSFTI

SEQ ID NO: 30267 - protein, 422 aa, Glycine max
  Clone ID: TF_GmC55_1.pep
MKRMNESNNTDDGNNHNWLGFSLSPHMKMEVTSAATVSDNNVPTTFYMSPSHMSNSGMCYSVGENGNFHSPLTVMPLKSDGSLGILEALNRSQTQVMVPTSSPKLEDFLGGATMGTHEYGNHERGLSLDSIYYNSQNAEAQPNRNLLSHPFRQQGHVNVETHPYYSVFACRGLSGVSVGTVGCGELQSLSLSMSPGSQSSCVTAPSGTDSVAVDAKKRGHAKLGQKQPVHRKSIDTFGQRTSQYRGVTRHRWTGRYEAHLWDNSCKKEGQTRKGRQVYLGGYDMEEKAARAYDLAALKYWGPSTHINFSIENYQVQKKKKKKKKKSGCVAHLRRKSSGFSRGASIYRGVTRHHQHGRWQARIGRVAGNKDLYLGTLAPRAYGTQEEAAEAYDVAAIKFRGANAVTNFDISRYDVERIMASSN

SEQ ID NO: 30268 - protein, 418 aa, Glycine max
  Clone ID: TF_GmC601_1.pep
MASSSSDPGKSAETSEAALVVANDQLLLYRGLKKAKKERGCTAKERISKMPPCAAGKRRSIYRGVTRHRWTGRYEAHLWDKSTWNQNQNKKGKQVYLGAYDDEEAAARAYDLAALKYWGPGTLINFPVTDYTRDLEEMQNVSREEYLASLRRKSSGFSRGLAKYRGLSSRWDPSYGRMSGSDYFNSMHYGAGDDSAAESEYVSGFCIERKIDLTSHIKWWGSNKSRHSDVGTRLSEEKKLGSAGDICIEIKQLEQKVQPTAPYQMPQLGRPQNEKKHRSSSVSALSILSQSAAYKSLQEKASKTLENIIDNDENENKNTINKLDHGKAVEKPSNHDGGNDRLDIATGMSGTMSLQRNVYPLTPFLSAPLLTAYNTVDPLVDPVLWTSLVPMLPAGLSHTAEVTKTETSSTYTMFRPEE

SEQ ID NO: 30269 - protein, 188 aa, Glycine max
  Clone ID: TF_GmC90_1.pep
MRSSNGTSSSRASNGNTGRHPVYRGVRRRSSGKWVSEIREPKKPNRIWLGTFATPEMAAIAYDVAALALKGKDAELNFPNSASSLPIPASSAAHDIQMAAALAATAVGAANDALEGSQGGNVSVSLAEEFSGGNLNHFVDEDLIFDMPNILVNMAEGMLLSPPRFDNFAATDYEYMDEDPNLWGFPNY

SEQ ID NO: 30270 - protein, 188 aa, Glycine max
  Clone ID: TF_GmC90_2.pep
MRSSNGASSSRASNANTGRHPVYRGVRRRSSGKWVSEIREPKKPNRIWLGTFATPEMAAIAYDVAALALKGKDAELNFPNSASSLPVPTSSAARDIQMAAASAAAAVGAANDALEGSRGGNASVSLTEEFSGGNLNHFVDEDLIFDMPNILVNMAEGMLLSPPRFDNFAATDYEYMDEDPNLWGFPNY

SEQ ID NO: 30271 - protein, 188 aa, Glycine max
  Clone ID: TF_GmC718_1.pep
MRVSTETEPETKKIKRIRGGGDSSKHPLYRGVRMRNWGKWVSEIREPRKKSRIWLGTFPTPEMAARAHDVAALSIKGPAAILNFPHLANSLPRPASLAPRDVQAAAAKAAHMDPSSLSSLVSAMDLSSASDELSQIIELPSLESTDDGSVDLKKEFVFVDSLDAWMYQPPFGFDTEQDTGFEGLMWNY

SEQ ID NO: 30272 - protein, 188 aa, Glycine max; identical to SEQ ID NO: 30271
  Clone ID: TF_GmC718_2.pep

SEQ ID NO: 30273 - protein, 147 aa, Glycine max
  Clone ID: TF_uC-gmroLIB3259P226b12b1.pep
MNASNHEICYSPTYNSFPSSTTFRLEGVHDAEGSLACKREHPKVEREVHAPPAWKRYRGVRRRPWGKFAAEITDPKKNGARIWLGTYETEEEAGLAYDRAAFEMRGSKAKLNFPHLIGSHAPLKPIRVLTKTLKQNLLESDLSYSSA

SEQ ID NO: 30274 - protein, 293 aa, Glycine max
  Clone ID: TF_GmC55771_1.pep
HKEYRAANVKVDPRRLHGKLPLSSQASEEKEDTVEEFDAYNNYASWSSETDMSEMVSALAQVMGTTNRNPYMPQSTSFPFSTSVVKDQPQPYPSQPPPDQEVAKKPHYRGVRQRPWGKWAAEIRDPKKAARVWLGTFETAEDAALAYDKAALKFKGTKAKLNFPERVHQDVPFMQQHQQRSSNRNVFPIHATSTTSSATGSVSSVDAVAPPSLSTHDQHGHQVFPNLYQYAQILSSDDAQLPYFTSHLFNQQQQQQQQQPFNSQFSSTFSSTSSYFYNQQQQYDQQGHDHSNH

SEQ ID NO: 30275 - protein, 108 aa, Glycine max
  Clone ID: TF_GmC3803_2.pep
TRPIWLGSYTTPMAAARAYDTAVFYLRGPTARLNFPELLFQDDQEEGNDSVQHGAAAGNMSADSIRRKATQVGARVDALQTALHHHASSTNSLKPDLNEFPKLESLQD

SEQ ID NO: 30276 - protein, 234 aa, Glycine max
  Clone ID: TF_GmC188491_1.pep
MDFDSSFFQYQNFNSSFVNSSVCAEPFPWEDFLFFNEENTTTTTTALDSFTITDHSSQSQIKESSSSDYSNSSGSLVSSTESSQLEVSSNLTHASHQLKETHASPQPQPPKETNKDKRPFRGVRRRPWGKFAAEIRDSTRNGVRVWIGTFDTAEAAALAYDQAALSTRGSMAVLNFPEEVVRESLKDMQSNNKPISLEDGSSPVLALKRKHTMRRKSRLPTKKTKGTMEWNHKM

SEQ ID NO: 30277 - protein, 178 aa, Glycine max
  Clone ID: TF_GmC768_2.pep
TPEETTAEKTSNLDLIRQHLFGENIISDSSSFVSNLHHHPVKLEPPSSPEFECTSYILDNNTSSNFFTFLEGYDLPTMKKSEHYDEAKRYRGVRRRPWGKFAAEIRDPTRKGTRVWLGTFDSEIDAAKAYDCAAFKMRGQKAILNFPLEAGESDPKPNNSCGRKRRRDQNHDHEFELP

SEQ ID NO: 30278 - protein, 261 aa, Glycine max
  Clone ID: TF_GmC887_1.pep
MRRKKKLSTFPIIHPTPSQNRKEQASPSPFSLLMSNNKNTTFFPTPHGQIRTSEFVNSQNPPQATNQGIDDIRKKHYRGVRQRPWGKWAAEIRDPKKAARVWLGTFDTAEAAAMAYDAAALRFKGNKAKLNFPERVVMPIQPQTNNNNSTSSSAPTTQSSSSLPPPQSLHNNSSLSAEGFPNLEEYARLLSCSDDDDFQRVALGLYQHHNNEDFICGSSQPPPVPFFVSSSSSSSAMTSSYSDFLGQGGSTGFDEGNKRGS

SEQ ID NO: 30279 - protein, 166 aa, Glycine max
  Clone ID: TF_GmC23803_1.pep
MCGGAIISDFIDVNLNSGRKLTTHNTHHQLHTFSDFHATSSSKHQPSYQDPNLPRPPPLPNNQGVKLKALTLNTGRVRKNVYRGIRQRPWGKWAAEIRDPRKGVRVWLGTFNTAEEAARAYDNAAKRIRGDKAKLNFPDSKNPCLNPFQLKHLFSNLESFLGLDSL

SEQ ID NO: 30280 - protein, 533 aa, Glycine max
  unsure (1)..(533): unsure at all Xaa locations
  Clone ID: TF_GmC1761_1.pep
MWDLNXSPDQRINKDEESEEGCSSLKITSFDGDDENNNNKGKRLESVSNSSSSAVVIGDGSEEEYEEEEEDEEGVGVGGGRSMKKRSSKIFGFSVTQNEEESMDSDHPPVTRQFFPVEDADVAVATGGGGTGVSSTFPRAHWVGVKFCQSETLGTGKSSVEVSQPMKKSRRGPRSRSSQYRGVTFYRRTGRWESHIWDCGKQVCLGGFDTAHAAARAYDRAAIKFRGVEADINFNIEDYEDDLKQMSNLTKEEFVHVLRRQSTGFPRGSSKYRGVTLHKCGRWEARMGQFLGKKYVYLGLFDTEIEAARAYDKAAIKCNGKEAVTNFDPSIYNNELNTESTGNAPDHNLDLSLGNATSKPGNNQALGNHATNAVTHDQHLPSESNWRNGGNKPKLVNILPKPCNRSNNKDSHGRDVHGESETLRMLSQTHLHSPAFNEMQQRYGPYRSPGGESQMLQNFAHIHPPNFHFPRSSIGGRIGSDLSLSVADQQQWQTGPSRYLATAAASSSFQQEIRPSSQGWLQKNGLHSLMRPS

SEQ ID NO: 30281 - protein, 145 aa, Glycine max
  Clone ID: TF_GmC194109_1.pep
MKRSPASSCSSSTSSVGFEVHHPIEKRRPKHPRRNNLKSQKCKQNQTTTGGRRSSIYRGVTRHRWTGRFEAHLWDKSSWDNIQSKKGKQVYLGAYDTEESAARTYDLAALKYWGKDATLNFPIETYTKDLEEMDKGSREGILASL

SEQ ID NO: 30282 - protein, 247 aa, Glycine max
  Clone ID: TF_GmC884_5.pep
HASGSKYRGVTLTKCGRWEARMGQFLGKKAYDKAAIKCNRREAVTNFEPSIYESEMKPEAINEGGSHDLDLNLGIATPGHGPKENRGHLQFQSIPYNMHPGRSSRMETNVNSVIGDPSLKRLVVTEERPSVYSTFFPNLERAERMGIDPSKGVPNWAWQTNGQVNATPVPPFSTAASSGFSISATFPSTAIFPTKSMNPIPQSFCFTSHSTPGSNAPQFYYEVKSSQAPSQPLSCNTSINGSPPHKF

SEQ ID NO: 30283 - protein, 203 aa, Glycine max
  unsure (1)..(203): unsure at all Xaa locations
  Clone ID: TF_GmC1366_1.pep
MARPQQRXYRGVRQRHWGSWVSEIRHPILKTRIWLGTFETAEDAARAYDEAARLMCGARARTNFPFNPNVSHSSSSSSKLLSSTLTAKLHRCYMASLQVTRQALASESQRTPPSVQNATTSTTTPISNNFSVKSEQTHAVLPHKRPEEEQESEANRGVKRVNSVENVPLQFKPLEEDHIEQMIEEXLDYGSIELCSVISPQAL

SEQ ID NO: 30284 - protein, 116 aa, Glycine max
  unsure (1)..(116): unsure at all Xaa locations
  Clone ID: TF_LIB3242-517-P1-J1-E5.pep
GHAEKCAKRLMKNQYRAIRRPPWGKGAANIRXPMXGVRVWLATFSSAEEAARPYHAXSRRIHGQKPYVNLPDEPSCAVSLKPMTAIPYAQPMNKYLYSLKPKINHMLHFADILECF

SEQ ID NO: 30285 - protein, 296 aa, Glycine max
  unsure (1)..(296): unsure at all Xaa locations
  Clone ID: TF_GmC6807_2.pep
MMKNDREKGNEVDQSYIQQHHSLSMPMMFSGFNREKEMSAMITALTRVVCGDYSLVHHNIDNTNSAIVGGGGGDDVSNMASGSMPPSSTSLSHGGNSVLKRRREDDNTSDFLRGGSFPAILTTAEGSSTIRRRRANTVYDYEYRREKVKVGEGXEASRKYRGVRQRPWGKWAAEIRDPLKARRVWLGTFETAEDAARAYDQASLRFRGNKAKLNFPENVRLRHTETLQGSRASSNFYDNSYSHVHDLPVSLYDQTTMASSSTISMTSPQAPPSIYPTHLLPAWSSGYAYNSSSSSA

SEQ ID NO: 30286 - protein, 172 aa, Glycine max
  Clone ID: TF_GmC243461_1.pep
MPVHALPFSKDSPPPKPKEAHFRGVRKRPWGRFAAEIRDPWKKTRKWLGTFDTAEEAARAYDAAARTLRGPKAKTNFSYILAPAFHLPPPVLTTPEAHALAQAQAQEQLARQVEFCGPPFFFATDVASTAPVRSEYKGYKLENIAGFVVSKEEQKEKNKPFLFDLNLPAPLF

SEQ ID NO: 30287 - protein, 144 aa, Glycine max
  Clone ID: TF_LIB5118-012-Q1-PF1-H7.pep
MENLSPLIYKNPIRRTSRRSTMYLGVRKRPWGRYAAEIRNPYTKERHWLGTSDTAEEAAIAYDLSSIKICGINARTNFHYPFVSLPPLPMSSLPPPPPPPTPELDPSVEVCLEMMNAASYDGDDESLVIASILQSFSNSGNCSF

SEQ ID NO: 30288 - protein, 191 aa, Glycine max
  Clone ID: TF_GmC636_1.pep
MEQELPRSSVPDDDAATTTSSVDKPAIPHAGGTRHPLSGGVPARRWGRWVSHPLFRGVRKRRWGKWVSEIREPRKKSRIWLGSFPAPETHGNFPDEVHRLPPLPSSCTARDIQAAAAKAAHMMMVQAATADSPEKSSSITSDCGGRGGDDFWGEIELPDMFDGKWWASDHDVTPWPELELPPQPPFTTASL

SEQ ID NO: 30289 - protein, 233 aa, Glycine max
  Clone ID: TF_GmC120268_1.pep
MVEPAVAASSELSDSTRNTNTNTPSPSSSSSLSPSPSPSSSSSKKRARDNNNSRNNSNKHSVYRGVRMRTWGKWVSEIREPRKKNRIWLGTFATAEMAARAHDVAALTIKGSSAILNFPELAASLPRPASNSPRDVQAAAAKAASMEAPPRTPPSPAATPEDDLGEIVELPPLGTSFDSPDRSSEFVFLDMDDGWPYSHPWYHSIYDGGYFISDMNNMVSMQESESMVLSLWP

SEQ ID NO: 30290 - protein, 126 aa, Glycine max
  Clone ID: TF_GmC755_2.pep
RDSPPQRSSIYRGVTRHRWTGRYEAHLWDKNCWNESQSKKGRQGAYDDEEAAARAYDLAALKYWGQDTILNFPLSNYEEKLKEMEGQSKEEYIGSLRRKSSGFSRGVSKYRGVARYLNPALFTAKC

SEQ ID NO: 30291 - protein, 219 aa, Glycine max
  Clone ID: TF_GmC321_1.pep
MAPRDKTSAVKPSGNAGVKDLHFRGVRKRPWGRFAAEIRDPAKKTRVWLGTFDTAEEAARAYDAAAREFRGPKAKTNFPLPSENFKNASPSQSSTVESSSRDRDVAADSSPLDLNLAPVAVSSARFPFRNQFPVFPGAVPAANQVMYFDAVLRAGMAGPRGFAFGYNPHPVAASEYHATTSDSDSSSVIDLNHNEGVVKGNGSRMFDLDLNHPPPHEIA

SEQ ID NO: 30292 - protein, 561 aa, Glycine max
  Clone ID: TF_GmC12225_1.pep
MNNNWLSFPLSPTHSSLPAHDLQATQYHQFSLGLVNENMDNPFQNHDWNLINTHSSNEIPKVADFLGVSKSENQSDLAALNEIHSNDSDYLFTNNSLVPMQNPVLDTPSNEYQENANSNLQSLTLSMGSGKDSTCETSGENSTNTTTTTTVEVAPRRTLDTFGQRTSIYRGVTRHRWTGRYEAHLWDNSCRREGQSRKGRQVYLGGYDKEEKAARSYDLAALKYWGTSTTTNFPISNYEKELDEMKHMTRQEFVAAIRRKSSGFSRGASMYRGVTRHHQHGRWQARIGRVAGNKDLYLGTFSTEEEAAEAYDIAAIKFRGLNAVTNFDMSRYDVKAILESNTLPIGGGAAKRLKEAQALESSRKREEMIALGSSTFQYGTTSSNSRLHAYPLMQHHHQFEQPQPLLTLQNHDISSHFSHQQDPLHQGYIQTQLQLHQQQSGGSSSYSFQNNNINNAQFYNGYNLQNHPALLQGMINMGSSSSSSVLENNNSTNNNVGGFVGSGFGMASNATSGNTVGTAEELGLVKVDYDMPTGGYGGWSAAAAAESMQTSNSGVFTMWND

SEQ ID NO: 30293 - protein, 208 aa, Glycine max
  unsure (1)..(208): unsure at all Xaa locations
  Clone ID: TF_GmC1399_3.pep
MYGQSSSSSSSYESDLALLDSIRHHLLGESESIFGAPNFGSGRSSSFSSLDSCLSDNWGELPFKEDDTEDMVLYGVLRDAVNVGWVPSLDAGSPESVSSGFPAVKLEPDLMPALIRLEXSVRIAAEEKKVVPAKGKHYRGVRQRPWGKFAAEIRDPAKNGARVWLGTFETAEDAALAYDRAAYRVGTVQEQVGSQVAECTRGEQLLVS

SEQ ID NO: 30294 - protein, 127 aa, Glycine max
  Clone ID: TF_9564630.pep
MASSSSLSSSKRHPLYHGIRCRGGKWVTEIREPRKTNRIWLGTFLTPEMAAAAYDVAALALKGGEAVLNFPDSVGGYPVPASKSPADIRTAAIAAAELMKPEASHNNNNVNASTTNEAEVVQYDNNN

SEQ ID NO: 30295 - protein, 309 aa, Glycine max
  Clone ID: TF_GmC1816_1.pep
MAATMNFYNETSQQVQSDPFRGELMEVLEPFMKTCPSSTPSILSSDSPSPSPLNFPSSSLLSPHPNFYTHTPPPSYLLQSQQSLIGFEQPPSSLLGLNHLSPSQISQIQAQIEAQQSQNQNPHSLNFLGPKPVPMKHVGGPPKPTKLYRGVRQRHWGKWVAEIRLPKNRTRLWLGTFDTAEEAALAYDKAAYRLRGDFARLNFPSLKGSCPGEEYKPVHSAVDAKLDAICANLAEMQKQGKTEKGARSAKKSKQGPNQEAKPEPQASAESEGSADSSPLSDLTFDVTEPQWEHFNLQKFPSYEIDWDSL

SEQ ID NO: 30296 - protein, 230 aa, Glycine max
  Clone ID: TF_GmC1388_1.pep
MAPRDINRSNVVVVAGARAAALLSDQFFLGLRITNSSKKLTLMAPRDINRSNVVVAGGSNPTRKEIRYRGVRKRPWGRYAAEIRDPGKKTRVWLGTFDTAEEAARAYDAAAREFRGAKAKTNFPTHAELTHAAARSPSQSSTLDSSSPPTPPLDLTLAAPLAAGGALVFPVARPVVFFDAFERAEVRASFDLPVAAFSDSDSSTVMDYERGSRRRVLDLDLNVPPPPEVA

SEQ ID NO: 30297 - protein, 276 aa, Glycine max
  Clone ID: TF_GmC88_2.pep
HASGDFGAFLAVIKLFDSSTVYLGGYDKEEKAARSYDLAALKYWGPTATTNFPVSNYSKEVEEMKHVTKQEFIASLRRKSSGFSRGASIYRGVTRHHQQGRWQARIGRVAGNKDLYLGTFATEEEAAEAYDIAAIKFRGANAVTNFEMNRYDVEAIMKSSLPVGGAAKRLKLSLESEQKALPVSSSSSSNQQQNPQCGNVSASINFSSIHQPIASIPCGIPFDSTTAYYHHNLFQHFHPTNAGTAASAVTSANANALTALPPTAAAEFFIWPHQSY

SEQ ID NO: 30298 - protein, 179 aa, Glycine max
  Clone ID: TF_GmC331_1.pep
MSRSSAMHGITSTNNKLKGVRRRKWGKWVSEIRVPGTQERLWLGTYATPEAAAVAHDVAVYCLSRPSSLDKLNFPETLSSYSVQLRDMSPRSVQKVASDVGMDVDARNIVAGKTSTVGAETNCESDERTSTASVCNVVGEGGADHSDVFWWDDDGGSWHGSGGDSTERDALSISIEDYL

SEQ ID NO: 30299 - protein, 114 aa, Glycine max
  Clone ID: TF_GmC1399_5.pep
PAKNGARVWLGTFETAENAALAYDRAAYRMRGSRALLNFPLRINSGEPEPVRVTAKRYSPEPSSSSSDSASSTKRRKKVVGSTVTAQSGLRKEQVGSQVAHSAHVESSCWSTNA

SEQ ID NO: 30300 - protein, 158 aa, Glycine max
  Clone ID: TF_GmC566296_1.pep
MEGGRSSVSNGNVEVRYRGIRRRPWGKFAAEIRDPTRKGTRIWLGTFDTAEQAARAYDAAAFHFRGHRAILNFPNEYQSHNPNSSLPMPLAVSAPPSYSSSSSTSNYSGDDNNNHLVRPAFSGEIMQGGDHDDDTFELEYFDNKLLEELLQMQDNRHF

SEQ ID NO: 30301 - protein, 106 aa, Glycine max
  Clone ID: TF_GmC31_2.pep
MVSTKKEATCYATRRYRGVRRRPWGKFAAEIRDPKKKGSRVWLGTFDTEIDAAKAYDCAAFRMRGHKAVLNFPLEAGMSHPEPNSSGRKRRRDYTTAVTSSSHVMS

SEQ ID NO: 30302 - protein, 263 aa, Glycine max
  Clone ID: TF_GmC106_1.pep
ASDSSSLLHQHHHHQQQHQQHQQQLLQYWSDALNLSPRGMLTRLGPDGRPLFRLPTQPINTTKLYRGVRQRHWGKWVAEIRLPRNRTRLWLGTFDTAEDAAMAYDREAFKLRGENARLNFPELFLNKDKKEEQQQQEQEASSPVLSAIAKQHEPSSEHRDVPIEESNENDSGDATVSDDQVHATTESSEGVSQEMVWGEMSAWFNAIPAAWGPGSPMWDDLDATNNLLCQSHIPFSNPNQQELNDAERQEQNTGPGYLWKDQD

SEQ ID NO: 30303 - protein, 115 aa, Glycine max
  Clone ID: TF_13787956.pep
IYRGVRTRDCVKRVADIQRPKNQTRVWMGTLNTDYEATLAYYKGAHKLGGDYARLNSTKLRHHCCDTGGDLREYNPVHSVPDAKLNAMSEGLSLLQIQVTTGNPPKKTRSKLNSA

SEQ ID NO: 30304 - protein, 167 aa, Glycine max
  Clone ID: TF_GmC36407_1.pep
MDSSSHQLLPFNENDPEDMLLYGIITSCQEKKVTINQEQVNKKRSSFRGVRRRPWGKFAAEIRDSTRHGVRVWLGTFDNAEAAALAYDQAAFSMRGSGAVLNFPVEKVKESLRDMKLDGCSPVVALKRRHSLAAKRKKEDVLVFHDLGADYLEHLVMCSDLPSTTIV

SEQ ID NO: 30305 - protein, 191 aa, Glycine max
  Clone ID: TF_GmC636_2.pep
MEQELQRNSVHDDEAATTTSSGDKPDTPRGGGTRHPLFRGVRKRRWGKWVSEIREPRKKSRIWLGSFPAPEMAGKAYDVTAYCLKGRRAQLNFPDEVHRLPPLPSSCTARDIQAAAAKAAHMMMVQAASADSPEKSSSITSDCDGSGGDDFWGEIELPELLNGKWWASDRHVTPWPETELPPQLPFTTACL

SEQ ID NO: 30306 - protein, 239 aa, Glycine max
  Clone ID: TF_GmC157860_1.pep
FGTRLVTTNYPFCTRCLIHSNNFKERSFSPSNMFSINHFSDPDATSPGSGGSSRPALSDEDFFLAASNPKKRAGRKKFRETRHPVYRGVRRRDSGKWVCEVREPNKKSRIWLGTFPTAEMAARAHDVAAIALRGRSACLNFADSASRLPVPATAEARDIQKAAAEAAEAFRPGKDDDAVAERVAATATEREEEQEEGMVPEYLRNMVLMSPTHCFGSDEYGSADVEFDDAEVSLWSYSI

SEQ ID NO: 30307 - protein, 230 aa, Glycine max
  Clone ID: TF_GmC1595_2.pep
MITDSWGSFAHYAVSVYLGGYDKEDKAARAYDLAALKYWGPTTTTNFPISNYEKELEEMKNMTRQEFVASLRRKSSGFSRGASIYRGVTRHHQHGRWQARIGRVAGNKDLYLGTFSTQEEAAEAYDIAAIKFRGLNAVTNFDMSRYDVKSIANSTLPIGGLSGKNKNSTDSASESKSHEPSQSDGDPSSASSVTFASQQQPSSSNLSFAIPIKQDPSDYWSILGYHNTPL

SEQ ID NO: 30308 - protein, 163 aa, Glycine max
  Clone ID: TF_GmC1970_1.pep
MASSSASREGHYRGVRKRPWGRYAAEIRDPWKKTRVWLGTFDTPEEAALAYDGAARSLRGAKAKTNFPPAPPLCLDLNVPSSDHRWPHVPPRSLVLSEFLHTAVLRDIEPPQLPFPPAAAIVAHRSPHAGGVQVVESSPTASFLGLVRRGIPIDLNEPPPLWL

SEQ ID NO: 30309 - protein, 172 aa, Glycine max
  Clone ID: TF_GmC1970_2.pep
MAPSSSASASREGHYRGVRKRPWGRYAAEIRDPWKKTRVWLGTFDTPEEAALAYDGAARSLRGAKAKTNFPPAPPLCLDLNVPSSDHRWPHHVPPRSLVLSDFLHTAVLRDIDPPQQPFPPAAAVAHRNPHGGAMPVGGGVQVMEGSPTASFLGFVRRGIPIDLNEPPPMWL

SEQ ID NO: 30310 - protein, 174 aa, Glycine max
  unsure (1)..(174): unsure at all Xaa locations
  Clone ID: TF_7233004.pep
MELAPVKSELSPRSHRLLMIDGSEVIGTKCVKRRRRDSSTAVLGGYGQQGEQLEEQKQLGGQSTATTVNRSSRFRGVSRHRWTGRFEAHLWDKGTWNPTQKKKGKQVYLGAYNDEEAAARAYDLAALKYWGISTFTDIPVSDYEKEIEIMKTVTKEEYLASXRRRSSGVSRGVS

SEQ ID NO: 30311 - protein, 262 aa, Glycine max
  Clone ID: TF_GmC699_1.pep
FGSSGSSSSRFGSREYQNQRAKEGRFCEKLKIKNRPKFVGVRQRASGKWAAEIKDTSKKIRLWLGTYQTAEEAARAYDEAACLLRGSNTRTNFSTQGCGVATNSPISLKLRNLLDRKAMSNQSQSQIQRQSSMISSTFQGADTSASPNVSAINKIMVMENYSACSSEGKSLFLVQNHQVCDNPYGLDMNMINCSTGITPNTSQFDYSWPLAQQRINELPISKDDFGLNAERQLSGYATNECHEEDTYAYDVNYPLSHFFCFT

SEQ ID NO: 30312 - protein, 513 aa, Glycine max
  Clone ID: TF_GmC603_1.pep
MLKFCTPLLYNRFILYSISKGVLRRNHTREILGGSWQFKFGPKIVRKKTIVYIVFMSLLTVAHQRGSGEFMRFTESHGGGGGGDGDGEYGYGHDDGRGGGGGGSLGLNFNQVMQQGEVTTQGGTLVSGYNRGDPDLREMVSALTHVVVSSGSGQRSTEWIQQSGFPMMSASSLSCLSSFSSPSSSGASWVGHKRGREEEESSSSHNMIQQQQQSAPRLFRNIGDFMVPSQGDSSSATEEAPTSTTTSVTAVATTVTETPPPPGGGERRRKYRGVRQRPWGKWAAEIRDPHKAARVWLGTFDTEEAAARAYDEAALRFRGNRAKLNFPENVRAVPPIQPFQATTRLTVSDSTTSQFRPLVTEAPPFIQQPQIQGSSDLIRDYLQYSQLLQSDFQQQQIQQQQQQQRQQQQRQRQQRQQQQQQQQQPSSLLQQLYYNAQFASLQSPSMLSSSPSFSSSVSPAPFPLFTTSASFPLFSSQQMGYFQPPESRNPAGGVPEFPTSTWSDTSSQPPPSG

SEQ ID NO: 30313 - protein, 440 aa, Glycine max
  Clone ID: TF_GmC603_2.pep
MSLLTVAHQRGSGEFMRFTESHGGGGGGDGDGEYGYGHDDGRGGGGGGSLGLNFNQVMQQGEVTTQGGTLVSGYNRGDPDLREMVSALTHVVVSSGSGQRSTEWIQQSGFPMMSASSLSCLSSFSSPSSSGASWVGHKRGREEEESSSSHNMIQQQQQSAPRLFRNIGDFMVPSQGDSSSATEEAPTSTTTSVTAVATTVTETPPPPGGGERRRKYRGVRQRPWGKWAAEIRDPHKAARVWLGTFDTEEAAARAYDEAALRFRGNRAKLNFPENVRAVPPIQPFQATTRLTVSDSTTSQFRPLVTETPPFIQQPQIQGSSDLIRDYLQYSQLLQSDFQQQQIQQQSPSSLLQQLYYNAQLASLQSPSVLSSSPSFSSSVSPTPFPLFSTSAQFSSASFPMFSSQQMGYFQLPESCPPAGGVPEFPPSTWSGTSGQPPPSG

SEQ ID NO: 30314 - protein, 127 aa, Glycine max
  unsure (1)..(127): unsure at all Xaa locations
  Clone ID: TF_jC-gmfl02220146c10a1.pep
RDGAGGVDCFSVTLHEQESMDRDHSPVTRQFFPAEDADAAGATFGGGPGLTSTIPCAHWLRVKFCHSYSLCTGKSXGEVFLPMKKSRRGPXSMSSQFRGVTLYHITGRWESHIWHWGKQVYLCGSYT

SEQ ID NO: 30315 - protein, 157 aa, Glycine max
  Clone ID: TF_GmC445884_1.pep
AGNKDLYLGTFSTEEEAAEAYDIAAIKFRGASAVTNFEMRRYDVDAILNNSLPVGGIAKRFKVSPETENKALVSTIQPPQNTNASSSINFSTIQPVSSIPYDSAITCYPHNLFHHFNPTNGESSTAEFAATMTDAIALATLPPLAVPGFFVWPHQNY

SEQ ID NO: 30316 - protein, 140 aa, Glycine max
  unsure (1)..(140): unsure at all Xaa locations
  Clone ID: TF_uC-gmrominsoy058g08b1.pep
MCGGAIICDFIPDAVAAGAGRLTGHYMWPDLKKRKNDLDVDLDADFRDFKDYSDIYYDNDRHDKPFAKASSSCRSTTAKTAALQVRAEKLADRKRKNQSKGIRQRPCGKWSGEMSDPRKEAREWLGTFNTSXEAARAYDA

SEQ ID NO: 30317 - protein, 112 aa, Glycine max
  Clone ID: TF_6724385.pep
MDEEGSRGRAKEDAGDVRYRGVRRRPWGKFAAEIRDSTRQGQRVWLGTFNTAEEAARAYDRAAYAMRGPFAILNFPDEYPMTAGGATNAATYSSAASSSSSASSSRHANVAR

SEQ ID NO: 30318 - protein, 203 aa, Glycine max
  Clone ID: TF_GmC1593_1.pep
MLKSGMGIEERKQVKKPAQASSRKGCMRGKGGPENASCTYKGVRQRTWGKWVAEIREPNRGARLWLGTFETSHEAALAYDAAARKLYGSDAKLNLPELSIKSQSQCPPPPSSQVGVGVPIYTSDSIVSLPLDTNPKPVENDGDFRPSWGTMNEGLPVFDDSIWAEAAMSLDFPQIAAETAIYSSGNNLADVGVWDSLQTPWCM

SEQ ID NO: 30319 - protein, 110 aa, Glycine max
  Clone ID: TF_LIB3242-641-P1-J1-G1.pep
MCGGAMISDFMLLFETSNILRVFWENWLKNGSTTAKSVAFQVRAEKFANRKRKNQYRGIRQRPWGKWAAEIRDPRKGVRVWLGTFNTAEEAARAYDAEARRIRGKKAKVN

SEQ ID NO: 30320 - protein, 240 aa, Glycine max
  Clone ID: TF_GmC953_1.pep
TLISCRCLLEELISVFFVIFPNQRCAPQHILTKAFNFPTPFQMLAKAHNKGDGSKSLAKILAKWKEYNAQIDSSSDADKPIRKVPAKGSKKGCMKGKGGPENSRCNYRGVRQRTWGKWVAEIREPNRGNRLWLGTFPTAIGAALAYDEAARAMYGSCARLNFPNVSVSSFSEESSKDSPSANHCGSSMAVSANESMISPSNSGVDAEEDVDMEPISLSLSVKHENGEGESGISSSPPSSS

SEQ ID NO: 30321 - protein, 209 aa, Glycine max
  Clone ID: TF_GmC768_1.pep
MTTAEETSNLDLIRQHLLGENIISDSSFFSNLLHHPMKLEAPSSPEFDFTSYISDNTSFFTFLEGYDLMADMKFVDSDNTIPSKEVKKCNISPEPLVSSKEKPKKLEYDKAKRYRGVRRRPWGKFAAEIRDPTRKGTRVWLGTFDSEIDAAKAYDCAAFKMRGQKAILNFPLEAGLSDPKPNSCGRKRRRESHDHELELPQVQVHHGVS

SEQ ID NO: 30322 - protein, 323 aa, Glycine max
  Clone ID: TF_GmC307_2.pep
PVEDSELPVSAAAAGSGGGGGGSSFPRAHWVGVKFCQSETPGAGKAVKVSEPMKKSRRGPRSRSSLYRGVTFYRRTGRWESHIWDCGKQVYLGLFDTEIEAARAYDKAAIKCNGKEAVTNFDPSIYDSELNSESSGGVAADHNLDLSLGNSSSKHNNSQTSGNHFANSATDQHMPPESNWRNGGSKPKLVNILPKPCGRSNIEAYGHGESETLRLLSQTHLQSPTNKEMHRYCPYRSPAEPQMPHNFAHHLHQPSFHVPSSSSNRGRIGSDLSLSMSDQQQWQQAGPPHLLATAAASSGFPQQIRPSQGWLQKNGFHSLMRPS

SEQ ID NO: 30323 - protein, 293 aa, Glycine max
  Clone ID: TF_GmC6126_21.pep
MASSSIKHTHHLNRTKLFMKEETLLKKKHHYPKIIRIRVTDADATDSSSDDDEPSMSSTRRRVKNFVNEITIQGGGGGGGDVNVVSKKRRFKSGAGAPLCRRKTGAKKFRGVRQRPWGKWAAEIRDPSRRVRLWLGTYDTAEEAAIVYDNAAIQLRGADALTNFITPPPENRKTGYCSGEESRNNDDLRSPTSVLGRCSVSEEAVTANDVFGGSSECEYSCVSESVFPIPNEVVFDFESTLDMFDEGINNVVAETSIFLAEDLDLGFTSWHRECDNFQDIGGDLFVWDPLVAL

SEQ ID NO: 30324 - protein, 198 aa, Glycine max
  Clone ID: TF_GmC320_2.pep
MAKPSSEKPEEHSDSKYYKGVRKRKWGKWVSEIRLPNSRQRIWLGSYDTPEKAARAFDAAMFCLRGRNAKFNFPDNPPDIAGGTSMTPSQIQIAAAQFANAGPHEGHSGRPEHPPMESPSPSVSEGTIQTDSDVPTLNGSVTDLFTPVGSSGYASDYGIFPGFDDFSGDFYVPEMPNVNYGEENGEGFIVDESFLWNF

SEQ ID NO: 30325 - protein, 277 aa, Glycine max
  Clone ID: TF_GmC4678_2.pep
KYIKCKLTSPVAKPFSITSAPDDDYLSVHIKILGDWTRSLKAKFTQACQQPLNGQSGLLRAECLKGDNSPSSFPKVLVDGPYGAPAQDYREYEVVLLVGLGIGATPMISILKDMVNNFKAIDEEEGIGGAKSPTRLSDFKTSRAYFYWVTREQGSFDWFKGVMNEVAEEDRRKVIELHSYCTSVYEEGDARSALIAMLQSLNHAKNGVDIVSGTRVMSHFAKPNWRSVYKRIALNHPDARVGVFYCGPSALTHELRQLALDFSHNTSTKYDFHKENF

SEQ ID NO: 30326 - protein, 279 aa, Glycine max
  Clone ID: TF_GmC1178_1.pep
MMSRFMHAPSPVLSSSHPHLGVGHKREREDDTGAGASGGVAIAAASSQTQTQEIESAGGDRRRRYRGVRQRPWGKWAAEIRDPHKAARVWLGTFDTAEAAARAYDEAALRFRGNRAKLNFPENVVPVPPPPPVPDLPASAVAGSDSISGSGSVVAGFSPTLMQGAPFQGSSAFLRDYWGYSQLLRSTGDFHGLDQWFFDSQMAAFQSSSSSLLPSPPPPSFSPSSASYPLFSSSQQMGIFRPPGEQGHGGEDGGSGSEFSELPPSTWSDTSGYPPPPPG

SEQ ID NO: 30327 - protein, 279 aa, Glycine max; identical to SEQ ID NO: 30326
  Clone ID: TF_GmC1178_2.pep

SEQ ID NO: 30328 - protein, 136 aa, Glycine max
  unsure (1)..(136): unsure at all Xaa locations
  Clone ID: TF_jC-gmst02400023c03a1.pep
ARAQQRLVTAGCVVAVKCAMRERINHSRGIRQCSWGKWAAEIRDPXKGVRVRLGTFNSAEEAARAYDAAAGRFLGKRANVNLTDEPVGAAVYVXRLKENAEAESMKENLNTVKPNMNQMLNSGHNLQGYYSPVDHV

SEQ ID NO: 30329 - protein, 239 aa, Glycine max
  Clone ID: TF_GmC1169_1.pep
MVQSKKFRGVRQRHWGSWVSEIRHPLLKRRVWLGTFETAEEAARAYDQAAILMSGRNAKTNFPITQTPEGDPKSTTSEDTPSTTSKDLEEILHAKLRKCGKVPSPSMTCLRLDPENSHIGVWQKRAGRRSDSNWVMTVQLGKKSVNVNNNDTHHQADSSSSSSLSSSLPSSEHHHIESPSLAVTGNLHHQEVVRGEIDEEERIALQMIEELLNDRNCPSPSFNNNIQERDGADHDHFFL

SEQ ID NO: 30330 - protein, 184 aa, Glycine max
  Clone ID: TF_GmC1487_1.pep
MDHQPPPCPAAASATDNPRGGTRHPMYRGVRKRRWGKWVSEIREPRKKNRIWLGSFPVPEMAARAYDVAAYCLKGRKAQLNFPDDVDSLPLPSSRTARDIQTAAAQAARMMKASGNDEKSGIASDDGDSGCDDFWGEIELPELMDGECCWGCPAGASSWTSSGDLAEWPEEELSPQQPSFMACL

SEQ ID NO: 30331 - protein, 218 aa, Glycine max
  Clone ID: TF_GmC16307_1.pep
MVQTRKFRGVRQRHWGSWVSEIRHPFLKRRVWLGTFETAEEAARAYDQAAILMSGRNAKTNFPILQTPEGDPKTTLTPIDHETSSSSTTTSKELEEILHAKLRKCGKLPSPSMTCLRLDPENSHIGVWQKRAGQRSDSNWVMMVPPLGKKGGANEGGTGGDASCSNSFPFSECDPTPQVARQELLRTEMDEEERIALQMIEELLSRNCPTSPSFNNLY

SEQ ID NO: 30332 - protein, 213 aa, Glycine max
  Clone ID: TF_GmC1010_1.pep
MDQETTRRNTMQECHVIAPTTTTATSSYRGVRQRKWGKWVSEIREPGKKSRIWLGSYESPEMAAAAYDVAALHLRGRAARLNFPELVETLPRPTSSKPEDVQVAAQQAAVMFRISPTMSPINNHQGCVNDNNIIKGSVVPVRVGLSPTQIQAINESPLDSPKMWMVQMAEALRFGFDDHSMMMLPSDDDDYALELSGWEEIQHESLWDSPEYM

SEQ ID NO: 30333 - protein, 213 aa, Glycine max
  Clone ID: TF_GmC56_2.pep
KGVRMRKWGKWAAEIRDPFKGTRIWLGTFSTAEEASQAYETRRLEFEVMAKALSDEKSNNGSSNNNSVLSHTSPSSVLELDTSASNLIGSGKVSSNEIVETKGLEAEVAETKSLAAEFAELEIQDLSMLNVPSPSAVAAATSEYELDLLAFDSFKYGFDYEHGFDDDFAALEDIHICSFDDNEPSELPDYDFDDFGADEFAGWIEEPLNIPCV

SEQ ID NO: 30334 - protein, 119 aa, Glycine max
  Clone ID: TF_17963946.pep
MENNTIYCDLSPLESVQHYLLEHENDSNTISNVSNHEICLEGVHDSKGLFSCKSEQHVDAREFHTHPVWKHYRGVRRRPWGKFAAEIWVPKSKGGRVWLGTYETEEEAGLAYDRAAFKM

SEQ ID NO: 30335 - protein, 213 aa, Glycine max
  Clone ID: TF_GmC25_6.pep
MVKSKSVEKPAEEQQRGGVSAYRGVRKRKWGKYVSEIRLPNSRQRIWLGSYDSAEKAARAFDAAMFCLRGSGANFNFPSDRPNIAGGRNMTPSQIQIAAARFANSEPRKECSGKPVESLTSIEETTSFPVNSDTDTSSPLSVVTIQNDTEVATGSFPGIFSGFGSGNFVPEFSDFPSFDDFGHDFFVHELPGFDYGEENLDGLIIQDSFLWNF

SEQ ID NO: 30336 - protein, 145 aa, Glycine max
  Clone ID: TF_jC-gmXLIB3563P071cf05a2.pep
MVKSKSVEKPAEEQQRGGVSAYRGVRKRKWGKYVSEIRLPNSRQRIWLGSYDSAEKAARAFDAAMFCLRGSGANFNFPSDRPNIAGGRNMTPSQIQIAAARFANSEPRKECSGKPVVLTSIETTSFPVNSDTDTSSPLSVVTIQN

SEQ ID NO: 30337 - protein, 115 aa, Glycine max
  Clone ID: TF_GmC786295_1.pep
TRVKYRGVRKRPWGKFGAEIRDPTKPTGRQWLGTFDTAEEAARAYDRAAIALRGALAILNFPHEFHSHLPFILSNSSTKGNGSSFDKEVIELEYLDDKVLEELLELEEKRRSNED

SEQ ID NO: 30338 - protein, 242 aa, Glycine max
  Clone ID: TF_GmC700_1.pep
MAELPSSEASSSSASSRKHSSSEAHLPAPDQKRPKQARDSSSKHPVYRGVRMRAWGKWVSEIREPRKKNRIWLGTFATAEMAARAHDVAALAIKGNSAILNFPELAASLPRPDSNSPRDVQAAAAKAAAMEVNDVPTTPSSSSSSASLSLSQSSSWSSLAVSSSSGDGPSTPEELGEIVELPSLGTSFEIPDPSGELVYLDPWPYSQAWSHGIYDESEGYFIGDSETESMILCGFEGSLWQH

SEQ ID NO: 30339 - protein, 100 aa, Glycine max
  Clone ID: TF_GmC250_3.pep
GSSINFPLSTYEKELEEMKHMTRQEFVANLRRKSSGFSRGASVYRGVTRHHQHGRWQARIGRVAGNKTHPLGETHNISIPHDYMTMIHLQRGEKRNGKYK

SEQ ID NO: 30340 - protein, 219 aa, Glycine max
  Clone ID: TF_GmC1715_1.pep
MDSPSSFFNSPSSGFCSESSSPEAFSWEGYLPFNENDPEEMLLYGMIAGATTEEHSGERASSEESAAARKEKSYRGVRRRPWGKFAAEIRDSTRHGMRVWLGTFDSAEAAALAYDQAAFSMRGSAAILNFPAEIVRESLKEMNYAHDDSNNEEGCSPVVALKRKHSLRRKINVRKKKNNNNNSKLQSSTVDNAVVFEDLGPDYLEQLLMSSDHHIPTTF

SEQ ID NO: 30341 - protein, 334 aa, Glycine max
  unsure (1)..(334): unsure at all Xaa locations
  Clone ID: TF_GmC158_1.pep
RPTRPYGCEKTTEGKRTSAVNKRALREDGGGGGGGGAMRYRGVRRRPWGRYAAEIRDPQSKERRWLGTFDTAEEAACAYDCAARAMRGLKARTNFVYPTSPQPSSAXPNTSPRNPSSLNMLLFRDLIHSNPSLLSSSSTQNFHDQFYNKSTSTFSSLPVSPSLAPPSYSMNNSCGGSLSVKMNTFPTCGTNFAEKGDDGDGFFSRESSDSGLLEEIVNKFLPRTKPSKCETTFANPQEESLLLPPLVSESTLVSTGQQYYDDDMKKGFPKNEGLGVFYSDQGFPMQQFDTSNGFNSMAMENDQNIINNAENCVVEDVFQYQELLNAFAIRMQNA

SEQ ID NO: 30342 - protein, 282 aa, Glycine max
  Clone ID: TF_GmC189492_1.pep
MSVHAKLKHHPMNLASPSSHFEDDPPCKTKTKTQRRLLRIIITDHDATDSDSSDEEQQQQQQKTRRVNREITQINMQLPLSHNSSFSPSSSYYSSASTSSEQNLKCKRPNKKPPPSSAEARRRNKFRGVRQRPWGRWAAEIRDPTRRKRLWLGTFDTAEEAATEYDRAAVKLKGPNAVTNFPLAPEATAQSPPLAADNLSSDGGASYSDLVASPTSVLAYECDSTPFDGFRYLDVDAFGFHIDAPLSLPEVNVNVALTCHHGKKQEEAFDEFDLDEFMTWPY

SEQ ID NO: 30343 - protein, 150 aa, Glycine max
  Clone ID: TF_17153962.pep
TSSVSHGSGSVVEAEVSVSYRGVRRRPWGKFAAEIRDSTRNGVRVWLGTFDTAEAAALAYDQAALVMRGSMAVLNFPAEIVRQSLRNMEQYGSFQEGSSPVLELKKRHSMKRKSETKKHQLHDVMVLEDLGAEYLEHLLTLSQDMDMDAC

SEQ ID NO: 30344 - protein, 428 aa, Glycine max
  Clone ID: TF_GmC6617_1.pep
IIPFFLSLSLTHPHDVKSCYFLFIPIISPDHVLTALFLLYRFNNSSGFSLPLTLLFPNHSPIWVHFVLHLNKKRNLEDSILCKHTVHSTVTKKLISPKKSSQTNSSTERTIVRISYTDPDATDSSSDEEGFPLVRQRMKRYVNQIEIETAFAEKVVRKRPAGEPCRRPAKLHSGKKFRGVRQRPWGKWAAEIRDPARRVRLWLGTYDTAEEAAMVYDNAAIRLRGPDALTNFVTPPQRDSPSPSPPPAAAETPAEVCDMKVVVTEEASGSGYDSSEDHCHHNLSSPTSVLQFRSNSSEENSESQQKAEQVLRECEGETETSLFEETGEFLALDNMPLPAWDDVFNFETPEYPPLLFQEEENLNLLHQSQMLGETVQFSSEEGFSDESSIMLADSLIDFDRACPSPSSLCQVDDFFQDILFASDPLVLL

SEQ ID NO: 30345 - protein, 119 aa, Glycine max
  unsure (1)..(119): unsure at all Xaa locations
  Clone ID: TF_jC-gmro02910014e07a1.pep
MKPYTSSPSSSKSKKKPTTTQQDHETAWGGRYLGVRRRPWGRYAAEIRDPSTKERHWLGTFDTAEEAALAYDKAARSMRXSRARTNFIYPDTPPGSSVTSILSPDEQXPNPNPPGPRRA

SEQ ID NO: 30346 - protein, 237 aa, Glycine max
  Clone ID: TF_GmC250_1.pep
AIGFSRGASVYRGVTRHHQHGRWQARIGRVAGNKDLYLGTFSTQEEAAEAYDIAAIKFRGTSAVTNFDISRYDVKRICSSSTLIAGDLAKRSPKESPAPVPASDFNSCGSSPMPLVSQPPPLAITDGEHSDELSNMMWNANNSDEQAQNESGGAEFNNNVTESSSSQQVSPSSNKDALNPQSPNEFGVSGADYGHGYFTLDGPKYDDGNNENDHMSTNRLGNLGLVNQVPMFALWNE

SEQ ID NO: 30347 - protein, 116 aa, Glycine max
  Clone ID: TF_GmC152_5.pep
QAYDDAAIRIRGDKAKLNFPATTISAAAAVPPPSKKQRCLSPDIITEESSSSSHSTTGSTGESGGGNDELDLKQIEWFLGLENELPVSNNIGAEWDNMDDLWMLDDVVVPNRHLIY

SEQ ID NO: 30348 - protein, 386 aa, Glycine max
  Clone ID: TF_GmC1286_1.pep
MKQAAALGGVQRARKRFVGVRQRPSGRWVAEIKDTIQKIRVWLGTFDTAEEAARAYDEAACLLRGTNTRTNFWPCSQSSTSPALSSKITNLLLQRLKERNNNNTCSSSSSSSTSLLINHQQMHQQVGAYGEGSTQFSIDQFTDFLNDPEDYSTSNNDFINNSAQIDYITSSFESCLTEKDGGTKIDMQYKSRNVTPQTSSNDSNSGVEDSEEEGSDLGVQSTNLDVHDFKFLDNIAPPSYYSPFEMAEEMEEEPVEPENENYGDEPSMLRAVMKRMTYERKFSASLYAFNGIPECLKLKLESGNMKGRGLADQLTSLQMACSKNILEKNKEEKEYIGTMDRRQEEEHQQTSPDMDSSSVDGELLLWNSLDLPPICFVNLLENGSFN

SEQ ID NO: 30349 - protein, 136 aa, Glycine max
  unsure (1)..(136): unsure at all Xaa locations
  Clone ID: TF_jC-gmXLIB3563P052af02a3.pep
THRHNRPSCTPAHIGAQWTLCPLNRSKECQGTAKKHPVYHGVRKKNWGQGXSEIREPXKKARIWLGTLSTPKMAVRAHDEAALTIKGQTTILNFPKTAHQIPRPVTCSPRDIQTAHTAVASMVKIDTVTQYSDSET

SEQ ID NO: 30350 - protein, 215 aa, Glycine max
  Clone ID: TF_GmC104_2.pep
MSSSSSSFFPAHITTDQEFSLIVAALTNVVSGSTSSSSVPEFRFPHSSPPLSSASLMPPPPPSIHTCRECNIAGCLGCNFFPEEQRKKYRGVRQRPSGKWAAEIRDRHRSARVWLGTFETAEDAARAYDKASFELRGPRAKLNFPLVDESLTLQPEMAATEEQINNEDNLNQGMGMDSHEFWDRINEADFHPFMMMMDFTGDSSDSAATGYTLSS

SEQ ID NO: 30351 - protein, 205 aa, Glycine max
  Clone ID: TF_GmC5319_1.pep
MATTISCDFSSMESIQHYLLEPEHDSNALMNISNHEVCYSATYNAFPSPTFSLEGVVHDANDSLACKREHPREEREVHAPPVWKHYRGVRRRTWGKFAAEIRDPKKNGARIWLGTYETEEAAGLAYDRAAFKMRGSKAKLNFPHLIGSHAPPQPVRVTKALKRNSPEKRKNLADLLNRLAKNRSQILIQVLEMGLHANYVNVEQW

SEQ ID NO: 30352 - protein, 222 aa, Glycine max
  Clone ID: TF_GmC15_1.pep
MAPRDHKTSNAKANGNGNSGVKEVHFRGVRKRPWGRYAAEIRDPGKKSRVWLGTFDTAEEAARAYDAAAREFRGPKAKTNFPLPLENVKNSSPSQSSTVESSSRDRDVAADSSPLDLNLAPAAVASARFPFQHQFPVFTGAVPAANQVLYFDAVLRAGMAGPRGFAFGYNHHPVAASEFHATTSDSDSSSVIDLNHNEGEVKGNGSRIFDLDLNHPPPHEIA

SEQ ID NO: 30353 - protein, 239 aa, Glycine max
  Clone ID: TF_GmC1684_1.pep
YGCEKTTEGYGCEKTTEGYGCEKTTEGYGCEKTTEGRTRGTENVKKEEGRRKYRGVRQRPPWGKWAAEIRDPFKAARVWLGTFDTAEAAARAYDEAALRFRGNKAKLNFPENVTLRQPQFTVSNPPSSLVSITTSIDPVVHSTRPLLLPSQASTATNVYEYFQLSGFPTNTNLYDGNRMFVTSNAMASHHLQSSSSLLSSSSSAFVSSVTSQDTSLSSLYSGQLPPWSKVSGHSSSSSG

SEQ ID NO: 30354 - protein, 156 aa, Glycine max
  Clone ID: TF_GmC392056_1.pep
MSSTTTDSDCSYLEQIQQYLLHNDSTILTPPQAFPSPSHDSSSDASVHFEHPSEAHDVNAPPKWRRYRGVRRRPWGKFAAEIRDPKKNGSRVWLGTYVNEEEAALAYDKAAFNMRGQKAKLNFPHLIGSGVQPEPPCLAVSRGAYQSLLPNTPYDS

SEQ ID NO: 30355 - protein, 351 aa, Glycine max
  Clone ID: TF_GmC326_6.pep
MDGGCVTDETTTSSDSLSVPPPSRVGSVASAVVDPDGCCVSGEAESRKLPSSKYKGVVPQPNGRWGAQIYEKHQRVWLGTFNEEDEAARAYDIAALRFRGPDAVTNFKPPAASDDAESEFLNSHSKFEIVDMLRKHTYDDELQQSTRGGRRRLDADTASSGVFDAKAREQLFEKTVTPSDVGKLNRLVIPKQHAEKHFPLSGSGDESSPCVAGASAAKGMLLNFEDVGGKVWRFRYSYWNSSQSYVLTKGWSRFVKEKNLRAGDAVQFFKSTGPDRQLYIDCKARSGEVNNNAGGLFVPIGPVVEPVQMVRLFGVNLLKLPVPGSDGVGKRKEMELFAFECCKKLKVIGAL

SEQ ID NO: 30356 - protein, 134 aa, Glycine max
  Clone ID: TF_10710623.pep
MVKSEHKIKTEPSSKAMRLSSPSSSTSDCKKKKYKGVRMRSWGSWVSEIRAPNQKTRIWLGSYSTPEAAARAYDAALLCLKGSSANLNFPLSSSQQYIPGDAVMSPKSIQRVAAAAAYSFIDNATTPPSPPSAS

SEQ ID NO: 30357 - protein, 312 aa, Glycine max
  Clone ID: TF_GmC1505_1.pep
MGTAIDMYNSSNIVADFLDPYSEELMKALKPFMKSDYFSASSSSSLESQPCSFSSNSLPTSYPSSNQIKLNQLTPDQIVQIQAQIHIQQQQQHVAQTQTHLGPKRVPMKHAGTAAKPTKLYRGVRQRHWGKWVAEIRLPKNRTRLWLGTFDTAEEAALAYDNAAFKLRGEFARLNFPHLRHHGAFVFGEFGDYKPLPSSVDSKLQAICESLAKQEEKPCCSVEDVKPVIHAAELAEVESDVAKSNAEYVYPEFEDFKVEHENPMFSGESSSPESSVTFLDFSDFSDSNNQWDEMENFGLEKFPSVEIDWEAI

SEQ ID NO: 30358 - protein, 97 aa, Glycine max
  unsure (1)..(97): unsure at all Xaa locations
  Clone ID: TF_LIB3242-559-P1-J1-G12.pep
LEGVYHTYFFVISKPHLLTSGGSLLVSAKKLTAEXTCIIIRGESAXLNVGINRTAKNLNNISKSXYIISCHNIQLGILTNASNAVGNRTIFVAYHHP

SEQ ID NO: 30359 - protein, 72 aa, Glycine max
  Clone ID: TF_LIB3242-501-P1-J1-E8.pep
VCKITSNIGFVSPMVKHLSGLGNRMQRSSLLNIVVIAHFEFTPMRYKYLALQPRYPKIFCQSQQNHRHKISS

SEQ ID NO: 30360 - protein, 359 aa, Glycine max
  Clone ID: TF_GmC340_2.pep
MAITATISVPFTSPSRRTLASVNSLSPRSTRSTLPTPQRTFKYPNSRLVVSSMSTETAVKTSSASFLNRKESGFLHFAKYHGLGNDFVLIDNRDSSEPKISAEKAVQLCDRNFGVGADGVIFVLPGISGTDYTMRIFNSDGSEPEMCGNGVRCFAKFVSQLENLHGRHSFTIHTGAGLIIPEVLEDGNVRVDMGEPILKASDVPTKLHANKDNAVVKSELVVDGVIWHVTCVSMGNPHCVTFSREGSQNLLVDELKLAEIGPKFEHHEVFPARTNTEFVQVLSNSHLKMCVWERGAGATLACGTGACATVVAAVLEGRAGRNCTVDLPGGPLQIEWREEDNHVYMTGSADVVYYGSLPL

SEQ ID NO: 30361 - protein, 110 aa, Glycine max
  unsure (1)..(110): unsure at all Xaa locations
  Clone ID: TF_11413657.pep
NDDDDKDRENNNVISFAKILTPSDANNGDDFSVPRFCADSCFPPLDFRTDLPVXLLSVADIHGVEWRFRHIYHGTPRHHFFTIGWSKFVNHKKLVDGDTVIXVKDSHDGM

SEQ ID NO: 30362 - protein, 488 aa, Glycine max
  unsure (1)..(488): unsure at all Xaa locations
  Clone ID: TF_GmC630_7.pep
XWDETSNIPRPERVSQWKIEPALAPLALNPLPMPRPKRPRSNVVPSSPDSSVLTREASKVSVDPLPTSGFQRVLQGQELSTLRGNFAESNESDTAEKSGVWPPATDDEKIDVSTSRRYGSDSWMSMGRHEPTYPDLLSGFGAHGDHSSHPSFVDQNGPVANLSRKHLLDREGKHNVLSPWPGVPSSLSLNLLDSNLKGSAQGGDTAYQVRGNLRYSSAFGEYPVLHGHKVEHSHRSFLMPPPPSTQYESPRSRELLSKPISGKPCEVSKLKDSDCKLFGISLLSSRPIASEPSLSQRNVTSESVGHMHTASHHQRAIENDQKSEHSRGSKPADGLLIDDHEKVLQTSQPHLKDVQAKSHSGSARSCTKVHKKGIALGRSVDLTKFSDYGELITELDQLFEFGGELTSPQKDWLIVYTDNEGDMMLVGDDPWQEFVAMVRKIYIYPKEEIQKMSPGTLSSKNEENQSASEGAADAQEIECQLNHSSSDT

SEQ ID NO: 30363 - protein, 113 aa, Glycine max
  Clone ID: TF_GmC140962_1.pep
MKAQPPDGAAAVAPNAGEGGEKKTINAELWQACAGPLLNLPSPGTHVVYFPQGHSEQVAASLKKDVDAQVPNYTNLPSKIPCLLHNVTLHADPDTDEVYAQMTLQPVPSFDTD

SEQ ID NO: 30364 - protein, 125 aa, Glycine max
  Clone ID: TF_GmC1198_4.pep
RLREDDRRARTSQFIVSVNKYLEAINQKCNVGMRFKMRFEGDESPENDKRFSGTILGVEDISPHWVNSNWRSLKVQWDEPASFPRPDRVSSWEIEHILACVPTTSSQPAVIKNKRPRQASEVPDL

SEQ ID NO: 30365 - protein, 127 aa, Glycine max
  Clone ID: TF_uC-gmflLIB3275P141f02b1.pep
TRVRHTVRCDLLNLKNQKGASLPPKWAPAGNQPQNIFCKTLTAGAPTPHGGFFWPCRPVEKGFPPWDFFKKPPVQKLIAGNLLWIEGKFKLIFRGQPKGHLLTTGWRVFVRAKKLVAGDSGLLIWNE

SEQ ID NO: 30366 - protein, 90 aa, Glycine max
  Clone ID: TF_701152936H1.pep
GCEKTTEGDEVYTQVTLLPQAELEGMYLEGKELEELGAEEEGDDRSPTKSTPHMFCKTLTASDTSTHGGFSVPRRAAEDCFPPLDYKQQR

SEQ ID NO: 30367 - protein, 164 aa, Glycine max
  Clone ID: TF_GmC229993_3.pep
GTEFSSGGWNNPLFGGGFLCGSESNLMSGGDHEMLVGRVAAESVVEAVTCAVNGRPFEVVYYPRASSPEFCVKASVVKAAMQIQWCSGMRFKMPFETEDSSRISWFMGTISSVQVADPILWPDSPWRLLQVHYTTIIINGVYFINVLTFPIRSSLPQLVFAQRQ

SEQ ID NO: 30368 - protein, 335 aa, Glycine max
  Clone ID: TF_GmC1322_1.pep
NSARVESLDCSYSVGMRFRMRFETEDAADRRFTGLIAGISDVDPVRWPGSKWRCLLVRWDDIEAARHNRVSPWEIEPSGSASNSSNLMAAGLKRNRIEMTSAKLEFPNPNGIQTSDFGESLRFRKVLQGQEILGVNTPPFDGINAQSPWLYELGRCYPGSNCSGIPPTGNNIRVPHPASDFSCNGIGFSESFRFQKVLQGQEILPSQPYGRALSIEEARANGRYGFYDGCQLLNSRNGWSAQMHDNASHLHASVTPAQVSSPSSVLMFQQAVNPVSNCDYNINKCNKEMEGRIHYQGLYTSEMKGRTLASSPFDDLIVSRRAPEGASSIGMFGCS

SEQ ID NO: 30369 - protein, 130 aa, Glycine max
  Clone ID: TF_GmC340_7.pep
MASAAPGATNDALYKELWHACAGPLVTLPREGERVYYFPQGHMEQLEASMNQGLEQQMPSFNLPSKILCKVVNVHLRAEPETDEVYAQITLLPEADQSEVTSPDDPLPESPRCSVHSFCKTLTACGTSTH

SEQ ID NO: 30370 - protein, 662 aa, Glycine max
  unsure (1)..(662): unsure at all Xaa locations
  Clone ID: TF_GmC340_1.pep
MASAAPGATNDALYKELWHACAGPLVTLPREGERVYYFPQGHMEQASMNQGLEQQMPSFNLPSKILCKVVNVHLRAEPETDEVYAQITLLPEADQSEVTSPDDPLPESPRCTVHSFCKTLTASDTSTHGGFSVLRRHALRTPPLDMTQXPPWQELVATDLYGNEWHFRHIFRGQXPRRHLLTTXWSVFVSYKKLVAVDAFIFLRGENGELRVGGRRLMRQHSNMPSSVISTHNMHLGALTTASPAKETGTVLSRFYKPRXAGLSLLVVASPVVEDACGNILAXSSGMRFKRRFEGGSRFRGTIAGVGXEVGMINRAFEWRSLKVEWDEPSSILRPVSISARDLEPPVTTPHKDSQPSQCNXKSGPLILPSTMPDSSLQGVWKSPVESAPFSYCDHQHGRDVYPSTNFNSTATGFLGFGGNCYASNKSIYWSSRMENSTESFSPVALKEFGEKRQGTGNGCRLFGIQLHDNSNANEENLPMVTLSGRVGDDGSVPSLDAESDQHSEPSNANRSDIPSVSCDAEKSCLQSPQESQSRQIRSCTKVHMQGMAVGRAVDLTRFDGYEDLLRKLEEMFDITGELCGSTKKWQVVYTDNEDDMMMVGDDPWLEFCSIVRKIFIYTAEEVRKLSPKIGLPISEEVKPSKMDSEAVANPEDQSSIVGPGC

SEQ ID NO: 30371 - protein, 191 aa, Glycine max
  Clone ID: TF_GmC630_4.pep
MATSEVSIKGNSVNGKGDNSSGGYTNDVRNGSGGGEARNSSSSSSSARDAEAALYRELWHACAGPLVTVPREGERVFYFPQGHIEQVEASTNQVAEQHMPVYDLPPKILCRVINVMLKAEPDTDEVFAQVTLLPEPNQDENAVEKEGPPAAPPRFHVHSFCKTLTASDTSTHGGFSVLRRHADECLPSLDM

SEQ ID NO: 30372 - protein, 154 aa, Glycine max
  unsure (1)..(154): unsure at all Xaa locations
  Clone ID: TF_GmC883036_1.pep
LSTKRLXAGDSVLFIXGIKRANRQQPALSSSVISSDSMHIGILAAAAHAASNNSPFTIFYNPRASPSEFVIPLAKYNKALFNQVSLGMRFRMMFETEESGVRRYMGTITGITDLDPVRWKNSQWRNPQVGWDESTARERPSRVSIWDIEPVVTW

SEQ ID NO: 30373 - protein, 187 aa, Glycine max
  unsure (1)..(187): unsure at all Xaa locations
  Clone ID: TF_GmC77382_1.pep
MRLSSADFSPPPQEGEKRVLDSELWHACAGPLVSLPAVGSRVVYFPQGHSEQVAVSTNKEVDAHIPNYPSLPPQLICQLHNMTMHADVETDEVYAQMTLQPLNPQEQNEAYLPAELGTASKQPTNYFCKTLTASDTSTHGGFSVPRRAAEKVFPPLDFSXQPPAQELIARDLHGNEWKFRHIFRGPA

SEQ ID NO: 30374 - protein, 76 aa, Glycine max
  Clone ID: TF_jC-gmro02910046c03d1.pep
LEDPFIFFIGQNGELSVGVRGALRQRGNVASSHLSSHSVRTGVPAPAWHAIWTGTIYTVYNKPRTSPAEFIEPYDQ

SEQ ID NO: 30375 - protein, 665 aa, Glycine max
  unsure (1)..(665): unsure at all Xaa locations
  Clone ID: TF_GmC1198_1.pep
TFSLNRGGGGEEDELYEQLWKACAGPHVEVPRTGQRVFYFPQGHMEQLEVSTKQKLNQRIPLFKWDSKILCRVVNVHLLAEQETDEVYAQICLEPVSXQAEPMSPDPCPAELPSPRVHSFCKVLTASDTSTHGGFSVLRKHATECLPALDMSKSTPTQELVAKDLQGYEWRFKHIFRGQPRRHLLTTGWSNFVTSKRLVAGDTFVFLRGNNGELRVGVRRIAPVQSSMPSSVISSQSMHLGVLATASHAVATQTLFVVYYKPRASQFIXSVWLGKFHASCNTLANCXLNIEILGTNXVQNYKRFSGTIVGVEDISPHWVNSNWRSLKVQWDEPASFPRPDRVLPWEIEPILASVPTTSSQTAAIKNKRPRQASELADLGDTALASPTFWDAGLTQSDMAKLSVMAEIKRSDSSSHMWHHNSKSSNNGISMNQTEAIWLSSPSQLYHDTTDDSKSISAWPISKPHSERLNNDHFLDQVDKEINKVEAATSYRLFGIDLIDHARNNSLSAENASGITSECKIDVNHVSDISKASKEWNQEQLQLSPKETQSKQVCSRSCTKVQMQGVAVGRAVDLTTLDGYDQLVDELEKMFDIKGQLQLRNKWEIVFTDDEGDMMLVGDDPWLEFCKMVRRIFIYSSQDVHKLSSGSKLPISSMEEIVTSLDTTET

SEQ ID NO: 30376 - protein, 818 aa, Glycine max
  Clone ID: TF_GmC695_1.pep
DEIYAQMTLQPLNSEREVFPISDFGLKHSKHPSEFFCKTLTASDTSTHGGFSVPRRAAEKLFPPLDYTIQPPTQELVVRDLHDNTWTFRHIYRGQPKRHLLTTGWSLFVGSKRLRAGDSVLFIRDEKSQLRVGVRRVNRQQTTLPSSVLSADSMHIGVLAAAAHAAANRSPFTIFYNPRACPSEFVIPLAKYRKSVFGTQVSVGMRFGMMFETEESGKRRYMGTIVGISDVDPLRWPGSKWRNIQVEWDEPGCGDKQNRVSVWEIETPESLFIFPSLTSGLKRPLPSGPLENEWGTLLTRPFIRVPENGTMELSNSIPNLYSEHMMKMLFKPQLINNNGAFLSAMQQESAATRGPLQEMKTTLAAENQMLLKNLHPQSIPDQPNALNMQSLLKNDQPEKFHPLAKIDNHLPSGIVIDKPKLECEVLPDRVIDYPSMEGCNNEKVAVNPVNQQGLATQLPFHNQNQSPLLPQSSPWPMQPLIESSMPHPQMIGMAQADSAMVNGLFPQLDIDEWLAYASSQPFAGQNRPTGPFSDLQEHNSLQPQVVNPPLPSMNNEVWDHYVKNFKFLSQADQLTSICQPGMYGLNGVPSSNNLRDLSAESNNQSEICVNVDASNSVGTTMVDPSTSSTILDEFCTMKDGEFQNPQDCMVGNLSSSQDVQSQITSASLAESHAYPLRDIPDNSGGTSSSHVDFDESSFLQNNSWQQVPAPIRTYTKVQKAGSVGRSIDVTTFKNYEELIRAIECMFGLDGLLNDTKGSGWKLVYVDYESDVLLVGDDPWEEFVGCVRCIRILSPSEVQQMSEEGMKLLNSGALQGMNV

SEQ ID NO: 30377 - protein, 55 aa, Glycine max
  Clone ID: TF_LIB4281-002-Q1-K1-F7.pep
RRIHLDTGPSDRDPRQRCPQLILWMFARQQPQCHSASWASFQLNTDNRGSFALCG

SEQ ID NO: 30378 - protein, 828 aa, Glycine max
  unsure (1)..(828): unsure at all Xaa locations
  Clone ID: TF_GmC630_1.pep
MASSEVTMKGNCLNHNDGGATEPHSPSTAKDAEAALFRELWHACAGPLVTVPREKERVFYFPQGHIEQVEASTNQVADQHMPVYDLPPKILCRVINVQLKAEPDTDEVFSQVTLFQEPNQDENAVEKEPPPAPPPRFHVHSFCKTLTASDTSTHGGFSVLRRHADECLPPLDMSKQPPTQELVAKDLHANEWRFKHIFRGQPRRHLLQSGWSVFVSSKRLVAGDAFIFLRXGENGELRVGVRRAMRQQGNVPSSVISSHSMHLGVLATAWHAILTGTIFTVYYKXPRTSPAEFIVPYDQYMESLKNNYSIGMRFKMRFEGEEAPEQRFTGTVVGIEDSDPKRWRDSKWRXFKVRWDETSNTPRPERVSPWKIEPALAPPALNPLSMPRPKRPRSNAVPSSPDSSVLTREASSKVSIDPSPANGFPRVLQGQEFSTLRGNFAESNEFDTAEKSVVWPPTAVDDEKMDVSTSRKYGSESWMSMGRNEPTYSDLLSGFGTSGDPSHLSLKDQMSPAYSARKQSLDHEGKLHMPYPWPVMPSSLSLNILDSNAKGPTHGGDTSFQARGNLRFSAFGEYPELHGHKVEDSHGNLMPPPPAPQTQYQSPCSRELMSKQVSAKTCEAVKPKDGDCKLFGFSLISGPIVPEPSLSQRNVSEPAGQMHLTAHQQRTSENDEKSDHSKGSRPVDDLVVDDHDRPLRTSQSHTKDVQAKPLSGSARSCTKVHKKGIALGRSVDLTKYSGYDELVAELDQLFEFGGVLVSTKKDWLIVYTDNDGDMMLVGDDPWHEFCAMDCKIYIYPKEEIPKMSPGTMSSKNEEKQSVMASDGARCKS

SEQ ID NO: 30379 - protein, 194 aa, Glycine max
  unsure (1)..(194): unsure at all Xaa locations
  Clone ID: TF_GmC896_4.pep
ARIPIPPLILCCVAAVKFLADPETDEVFARLRMVPLRNSELDYEDSDGNGGGXSEKPASFAKTLTQSDANNGGGFSVPRYCAETIFPRLDYSAEPPVQTVIARDVHGEVWKFRHIYRGTPRRHLLTTGWSSFVNQKKLVAGDSIVFLRAENGDLCVGIRRAKRGGVGGPKGPCGWSSYGSGGLVLEPYGAFSGL

SEQ ID NO: 30380 - protein, 71 aa, Glycine max
  Clone ID: TF_GmC240088_1.pep
MMASVEEKIKTGGVGGGMVVGGQTLVAEMKLLKEMQEHSGVRKTLNSELWHACAGPLVSLPQVGSLVVYFP

SEQ ID NO: 30381 - protein, 233 aa, Glycine max
  unsure (1)..(233): unsure at all Xaa locations
  Clone ID: TF_GmC216969_1.pep
MFMVMDSAERCLDSQLWHACAGAMVQMPPLNTKVFYFPQGHAEHAHGKVEYFGKNHQTRVPPLIPCRLSAMKYMADPDTDEVYVKMRLTPLREHELLDSQDDCFLGNTNSGGVENQEKPPTSFAKTLTQSDANNGGGFSVPRYCAETIFPRLDYSAEPPVQTIIAKDMHGQCWKFRHIYRGTPRRHLLTTGWSNIVNQTRLVAGDSIVFLRAENGDLXVGITRAKMGIDGGTE

SEQ ID NO: 30382 - protein, 709 aa, Glycine max
  Clone ID: TF_GmC1058_2.pep
MAGLIDLNNATEDDEMPSSGSSSTVCLELWHACAGPLISLPKKGSVVVYFPQGHLEQHLHDFPLPASANIPSHVFCRVLDVKLHAEEGSDEVHCQVVLVPETEQVHQKLREGEFDADGEEEDAEAVMKSTTPHMFCKTLTASDTSTHGGFSVPRRAAEDCFPPLDYSQQRPSQELVAKDLHGQEWRFRHIYRGQPRRHLLTTGWSAFVNKKKLVSGDAVLFLRGEDGELRLGIRRAAQLKSGSTFSALSGQQGSPTSLMDVVNALSARCAFSIHYNPRVSSSEFIIPIHRFVKSLDYSYSAGMRFRMRFETEDAAERRFTGLIVGIADVDPVRWPGSRWRCLMVRWDDLEATRHNRVSPWEIEPSGSASTANNLMSAGLKRTKIGLPSAKLDFPVSNAIGTSDFGESLRFQKVLQGQEMLGVNPTYDSFNAQSHQLSDLRRCYPGSNYPRIAATGNSIGIPQVSSNVSSNGIGFSESFRFQKVLQGQEILPSQPYGRALSVDEACGNGRCGLFDGFQAMRSRNGWSSHVSNNSSHLHPPVPSGQVSSPSSVFMFQQAVNPVSNSDYNNQIGQVMGGKVHQRVSYASEVKGGKFVSTPYEPLLRGLSQEGTNSFGLSNFHNQLDSSRSHDSVSVLRASQELVPSCKSRCRVFGFSLTEGAPVASKEATDSSAVACAGPSFTRHVEDDFHPGHSLRSKAVASYCTKGVLQY

SEQ ID NO: 30383 - protein, 698 aa, Glycine max
  Clone ID: TF_GmC340_3.pep
MASTLKSGGIHTGAINDDLYKELWHACAGPLVTLPREGERVYYFPQGHMEQLEASMYEGLEQQMPSFNLPSKILCKVVNVHLRAEPETDEVYAQITLLPEADQSEVTSPDDPLPESPRVKIHSFCKTLTASDTSTHGGFSVLRRHADDCLPPLDMSQQPPWQELVATDLHGNEWHFRHIFRGQPKRHLLTTGWSVFVSSKKLAAGDAFIFLRGENGELRVGVRRVMRQQSNVPSSVISSHSMHLGVLATASHAIATGTLFSVFYKPRTSRSEFIVSVNKYLEVQSHKLSVGMRFKMRFEGDEIPERRFSGTIVGVGDNKSSSVWPDSEWRSLKVQWDEPSSILRPDRVSSWELEPLVSTTLANSQPTQRNKRARPLILPSTMPDSSLQGGFAGLVVQNFFVILLPILFFYIIIFLCAPGIWKSSVESTSFSYCDPQQGRGLYPSPKFNSSATNFIGFSGNSSVGSPSNKSIYWSNRMENNLESISAIALKEAGEKRQGTGNGCRLFGIQLLENSNAEGNLQTVTLSGRVGDDRSVPSLDAESDQHSEPSNANRSDIPSVSCDAEKSCLQSPQESQSKQVHMQGMAVGRAVDLTRFDGYEDLLRKLEDMFNIKTELCGSLKKWQVVYTDNEDDMMMVGDDPWDEFCSVVRKIFIYTAEEVKKLSPKIRLPMNEKVNPSKQDSEAIVNPEDQSSNMGPSC

SEQ ID NO: 30384 - protein, 253 aa, Glycine max
  unsure (1)..(253): unsure at all Xaa locations
  Clone ID: TF_GmC245555_1.pep
DAWADAWAPPQLICQLHNVTMHADVETDEVYAQMTLQPFVRQEQKDTFLSMELGIPSKQPSNYFCKTLTASDTSTHGGFSVPRRAAEKVFPPLDFSQQPPAQELIARDLHDVEWKFRHIFRGQPKRHLLTTGWSIFVSAKRLVAGDSVLFIWNEKNQLLLGIRRANRPQTVMPSSVLSSDSMHXGLLAAAAHAAATNSXLPVFYNPRASPSEVXIPLSKYIKLVXYTYFLLGMRFRKLFETGEXSVRRYNGYN

SEQ ID NO: 30385 - protein, 690 aa, Glycine max
  Clone ID: TF_GmC630_2.pep
RVGYGKVLGITDSPPDECLPPLDMSKQPPTQELVAKDLHANEWRFRHIFRGQPRRHLLQSGWSVFVSSKRLVAGDAFIFLRGENGELRVGVRRAMRQQGNVPSSVISSHSMHLGVLATAWHAILTGTMFTVYYKPRTSPAEFIVPYDQYMESLKNNYTIGMRFKMRFEGEEAPEQRFTGTIVGIEDADTKRWPKSKWRSLKVRWDETSNIPRPERVSQWKIEPALAPLALNPLPMPRPKRPRSNVVPSSPDSSVLTREASKVSVDPLPTSGFQRVLQGQELSTLRGNFAESNESDTAEKSAVWPPVADDEKIDVSTSRRYGSDSWMSMGRHELTYPDLLSGFGTHGDHSSHPSFVDQNGPVANVGRKHLLDCEGKHNVLSPWSGVPSSLSLNLLDSNTKGSAQGGDTTYQVRGNLRYSSAFGEYPMLHGHKVEHSHRNFLMPPPPSTQYESPRSRELLSKPISGKPCEVSKLKDSDCKLFGISLLSSRPIASEPSLSQRNVTSESVGHMHTASHHQRAIENDQKSEHSRGSKPADGLLIDDHEKVLQTSQPHLKDVQAKSHSGSARSCTKVHKKGIALGRSVDLTKFSDYGELITELDQLFEFGGELTSPQKDWLIVYTDNEGDMMLVGDDPWQEFVAMVRKIYIYPKEEIQKMSPGTLSSKNEENQSASEGATDTQEIKCQLNNSASDT

SEQ ID NO: 30386 - protein, 231 aa, Glycine max
  Clone ID: TF_GmC144398_1.pep
MKLSSPGFSPPPQEGEKRVLDSELWHACAGPLVSLPAVGSRVVYFPQGHSEQVAVSTNREVDGHIPNYPSLPPQLICQLHNLTMHADTETDEVYAQMTLQPLNPQEQKGAYLPAELGTPSKQPTNYFCKILTASDTSTHGGFSVPRRAAEKVFPPLDFSQQPPCQELIARDLHGNEWKFRHIFRGQPKRHLLTTGWSVFVSAKRLVAGDSVLVIWNEKNQLLLGIRRANRP

SEQ ID NO: 30387 - protein, 136 aa, Glycine max
  Clone ID: TF_LIB4280-012-R1-K1-C7.pep
MPRQPPPSPPSQPGVLDPALWLVCAGTTVEIPTLHSRVYYFPQGHFDQASSAPRNLSPLLLSKPAVLCRVESVQFLADPLTDEVFAKLILHPVADCFASGPSAGAPAAASASAQTGENNVVSFSKGLTASDANNVG

SEQ ID NO: 30388 - protein, 453 aa, Glycine max
  Clone ID: TF_GmC1238_1.pep
LSTSASVSAGALLLRWGGFALLGLRAPRAPPPCHGPPEANSARQSYYPNFLSSVANAISAKSMFHVFYSPRASHADFAVPYQKYIKSIKNPVTIGTRFKMKFEMDESSERRLTFSDRTGMSDLDPYKWPKSKWRCLMVRWDEDIEISHQDRVSPWEIDPSSSLPPLSIQSSRRLKKLRPGLQAATPSHLTTGGSGFMDSEESVRSSKVLQGQENTGFMSLYYGCDKVTKQPEFEIRSPSHPNLASTGVRKISAAEFMRVHPSSFAGFSETNMFPRVLQGQEICPARSLTGKADLNFGSWGKPNVSYSNNNLHQATKPSFHSLGPEVIQTAYFPYGDIHNAGQGSSILCSKPTNFQRENIPFNTPSTQSGIMRNEVGRSDITIPNEQKLQDNISGTASLGANMRIPKDDNFKGQVKACKLFGISLSGETTAQNLQNSAKRSCTKVSDDSNRVIL

SEQ ID NO: 30389 - protein, 650 aa, Glycine max
  unsure (1)..(650): unsure at all Xaa locations
  Clone ID: TF_GmC695_2.pep
RSPFTIFYNPRACPSEFVIPLAKYRKSVFGTQVSVGMRFGMMFETEESGKRRYMGTIVGISDVDPLRWPGSKWRNIQVEWDEPGCGDKQNRVSVWEIETPESLFIFPSLTSGLKRPLPSGLLENEWGTLLRRPFIRVPENGTMELSNSIPNLYSEHMMRMLLKPQLINNNGAFLSAMQQESAATRGPLQEMKTTLAAENQMPLKNLHPHSIPDQPNALNMQSLLKNDQPEKLHPLGKIDNHLSSGIVIDKPKSESEVLPDHVIDYPSMEGCNIEKVAANPVNQQGLANQLPFHNQNQSPLLPQSSPWPMPPQIELSMPHPQMIDMVQADSAMVNGLFPQLDINEWMSYASSQPFAGQNRPTGPLSDLQEHTSLQPQVVNPPLPSMNNEVWDHYVKNLKFLSQADQLTSICQPGLXWLNGIPSSNNLRDLSAESNNQSEICVNVDASNSVGTTVVDPSTSSTILDEFCTMKDREFQNPQDCMVGNLSSSQDVQSQITSASLTESHAFPLRDIPDNSGGTSSSHVDFDESSFLQNNSWQQVPAPIRTYTKVQKAGSVGRSIDVTTFKNYEELIRAIECMFGLDGLLNDTKCSGWKLVYVDYESDVLLVGDDPWEEFVGCVRCIRILSPSEVQQMSEEGMKLLNSGALQGMNV

SEQ ID NO: 30390 - protein, 236 aa, Glycine max
  unsure (1)..(236): unsure at all Xaa locations
  Clone ID: TF_GmC240259_1.pep
PGILSAKVVAEAAELAARNMPFEVVYYPKERWSEFVVKTEAVNEAMKVAWSPGFXVKIAAETDDSSRVSWCQGTVSSVALHGNGQWRGSLWRMLQVTWDEPEGLQIAKWVSPWQVELVSTTPALHSAFPPIKRIKAAHDSGVFTNGERDPFPMTGFTNSTMGQLNQALLSYGTFPAGMQGARHDAFSASRFCNYPTDMSRLCMGNSFGKSTFPWLKTLETEVNVGSSQSDELSPDS

SEQ ID NO: 30391 - protein, 659 aa, Glycine max
  unsure (1)..(659): unsure at all Xaa locations
  Clone ID: TF_GmC127069_1.pep
MITFMDTKEKSKEVERCLDPQLWHACAGGMVQMPTVNSKVYYFPQGHAEHACGPVNFRTCPKVPPFVPCRVTAVKYRADPETDEVYAKLKLIPLNANDVDYDRDVVGGAETQDKPASFAKTLTQSDANNGGGFSVPRYCAETIFPRLDYSVDPPVQNILAKDVHGETWKFRHIYRGTPRRHLLTTGWSTFVNHKKLVAGDSIVFLRAENGDLCVGIRRAKKGICGGLETSSGWNPAGGNCHIPYGGFSPFLREDDNRILRNGNSNGLNPSVSMMGKGKVRPEAIIEAANLAANKKPFEVVYYPRASTPEFCVKASLVEAAMQTRWYSGIRFKMAFETEDSSRISWFMGTISSVQVADPLNWPNSPWRLLQVTWDEPDFPLDGQIPLPTLPNNLLGPNNTNQFGCLLESTPAESARARHAHYGLSLSDLHLSKLQSGLSSAGFPPLDHTATPMKVSNNKTLQKPSISENVSCLLSMTNSTRSSKKLDAGKTPSLMLFGQKILTEQQISPSSSVDTLSPVLTRNCSTDGNVNKVTNFFDGFGSALHQQGLHEHSSCEQVPXCKDNPQETEAGLEIGHCKVFMESEDVGRTMDLSLLPTYDEFHRKLADMFGIEKSEMLSRVLYCDSVGAIKHIGDEPFSDFTRTAKRLTILMDSGSNNVGV

SEQ ID NO: 30392 - protein, 150 aa, Glycine max
  Clone ID: TF_GmC137804_1.pep
AAESESSPLRNRRWTAHVPRVPAGNKTLWSSPAASEPYRRRTRATAADPNSCLFPSLRRHRHEPKLMMIQLNSVLMLMFYVLCFSFSLSLSLSECKIKKVELSGVSYLPHKTSPEFFFGSQRKKKGKEGDNFFLLHTLSVIYKTKQLNNN

SEQ ID NO: 30393 - protein, 113 aa, Glycine max
  Clone ID: TF_GmC5800_2.pep
MGLIDLNTTEDDEAAPLSASSPASYSSSSSHSGISTSASTLVVPPTPPSVCLELWHACAGPLISLPKKGSVVVYLPQGHFEHVQDFPVTAYDIPPHVFCRVLDVKLHAEEGSD

SEQ ID NO: 30394 - protein, 246 aa, Glycine max
  Clone ID: TF_GmC1198_2.pep
MLSRGAHGEVVGSGESGEDEMYEQQWKACAGPLVDVPRVGQRVFYFPQGHMEQLEASTNQELNQRIPLLKLPTKILCRVVNVHLLAEQETDEVYAQITLVPESSQDEPTNADPCTAEPPRAPVHSFSKVLTASDTSTHGGFSVLRKHATECLPVLDMSQPTPTQELVAKDLHGYEWRFKHIFRGQPRRHLLTTGWSTFVTSKRLVAGDTFVFSAWPISKPHSERLNNDHFLDQRMHLESPLSAKLM

SEQ ID NO: 30395 - protein, 134 aa, Glycine max
  unsure (1)..(134): unsure at all Xaa locations
  Clone ID: TF_jC-gmst024114e07a1.pep
ARVLTTGVIACVNKTKLVAGDAAMLLRGNHGELRLGIRWAAHLXKSWFVXGPSGQELNTATLKGVGNALSTRGAFSVRYNHRMSSAQVIIPVHRFLKSLDCSYSAGMRFMTHVETEDSXEPRCTGLIAGISDVD

SEQ ID NO: 30396 - protein, 175 aa, Glycine max
  unsure (1)..(175): unsure at all Xaa locations
  Clone ID: TF_GmC74745_1.pep
MKLSTSGLGQQGHEGGEKKCLNSELWHACAGPLVSLPTAGTRVAYFPQGHSEQVAATTNREVDGHIPNYPSLPPQLICQLHNVTMHADVETDEVYAQMTLQPLTPQEQKDTFLPMELGVPSKQPSNYFCKTLTASDTSTHGGFSVPRRAAEKXVFPPLDFSQQPPAAELIARDLH

SEQ ID NO: 30397 - protein, 134 aa, Glycine max
  unsure (1)..(134): unsure at all Xaa locations
  Clone ID: TF_GmC293503_1.pep
MEIDLNDAVTSEAEKSASCNGECEKGAALSSPTCSSSGSSSTRVSSSYIELWHACAGPLTSLPKKGNVVVYFPQGHXEQAASFSPFSPMEMPTYDLQPQIFCRVVNIQLLANXENDEVYTQVTLLPPAELAGMY

SEQ ID NO: 30398 - protein, 203 aa, Glycine max
  unsure (1)..(203): unsure at all Xaa locations
  Clone ID: TF_GmC86745_2.pep
MKLSSSGFNPPAEEEGEKKCLNSELWHACAGPLVSLPLVGSRVVYFPQGHSEQVAASTNREVDAHIPNYPNLPPQLICQLHNVTMHADAETDEVYAQMTLQPLSPXQKEVYLLPAELGTPSKQPTNYFCKTLTASDTSTHGGFSVPRRAAEKVFPPLDYSQQPPAQELIARDLHDNEWKFRHIFRGQPKRHLLTTGWSVFVSA

SEQ ID NO: 30399 - protein, 76 aa, Glycine max
  unsure (1)..(76): unsure at all Xaa locations
  Clone ID: TF_6070067.pep
ELCDACADPVVAVPXEKERVYYFRQGHMXEGEASTNHVADDHSAGDERPHNEVCQMISYHMDAGHDTDDMYAEVSV

SEQ ID NO: 30400 - protein, 81 aa, Glycine max
  Clone ID: TF_jC-gmXLIB3563P078bd01a1.pep
MASAAPGATNDALYKELWHACAGPLVTLPREGERVYYFPQGHMEQLEASMNQGLEQQMPSFNLPSKILCKVVNVHLRAEPE

SEQ ID NO: 30401 - protein, 102 aa, Glycine max
  Clone ID: TF_uC-gmflLIB3275P163h04b1.pep
MLCFLGAINDDLYKELWHACAGPLVTLPREGERVYYFPQGHMEQLEASMYEGLEQQMPSFNLPSKILCKVVNVHLRAEPETDEVYAQITLLPEADHSEVTQP

SEQ ID NO: 30402 - protein, 333 aa, Glycine max
  Clone ID: TF_GmC5800_1.pep
MGLIDLNTTEDDEAAPLSASSSHSGISTSASTLVVSPPPSVCLELWHACAGPLISLPKRGSVVVYLPQGHFEHVQDFPVNAFDIPPHVFCRVLDVKLHAEEGSDEVYCQVLLVPESEQVEHSLREGEIVADGEEEDTGATVKSTTPHMFCKTLTASDTSTHGGFSVPRRAAEDCFPPLDYSQQRPSQELVAKDLHGLEWRFRHIYRGQPRRHLLTTGWSAFVNKKKLVSGDAVLFLRGNDGELRLGIRRAAQLKWAGSFAVPSGQQLNPATLMDVVNALSTRCAFSVCYNPRYFSLYSLVPSPGVIEGNLLMSVPVHSYYGVFSVCIRWGWGF

SEQ ID NO: 30403 - protein, 605 aa, Glycine max
  unsure (1)..(605): unsure at all Xaa locations
  Clone ID: TF_GmC769_1.pep
PXTVMPSSVLSSDSMHIGLLAAAAHAAATNXFTVCYNPHLNCFSFKYVKAFSXTIFSLIRLKMLFETEESSVRRYMGTITGISDLDSVRWPNSHWRSVKVGWDESTAGERQPRVSLWEIEPLTTFPMYPSLFPLRLKRPWHPGTSSLHDGRDEATNGLMWMRGGPVDQGLNSLNFQGAGMLPWMQQRLDPTLLGNDQNQQYQAMLAAGLQNLGSGYLMKQQMMNFQQPYHYLQQSGNSNSPLQLQQQQPIQQSVSSNMLQPQAHVLTENLSQHLLQKPHNNQEVQAQQQQHTYQDSLLIPSDQLHQRQHSGIPSPSYSKPDFLDSSMKFPASVSPGQNMLSSLCPEGSGSLLNLSRSGQSLLTEQLPQQQWTQKYAPVQVNAYGSTVSHAQYSGKDSVMVLPHCNSDAQNSTLFGVNIDSSGLLLPTTVPGYTTSSADTNSSTMPLAESGFQGSLYGCMQDSSELLQSAGHVDPENQTQTFVKVYKSGSVGRSLDISRFSSYHELREELAQMFGIEGKLEDPLRSGWQLVFVDRENDVLLLGDDPWESFVNNVWYIKILSPEDIQKMGDQAVESLALGSGQRLNGTGAESQDIVSGPPSIGSLEY

SEQ ID NO: 30404 - protein, 100 aa, Glycine max
  Clone ID: TF_LIB4281-036-R1-K1-A6.pep
MHSVIGNVRKVSGVTCWSSSTCSSSTSSSSALVSSSYLELWHACAGPLTSLPKKGNVVVYFPQGHLEQVASFSPFTPLEIPTYDLQPQIFCRAANVQLLA

SEQ ID NO: 30405 - protein, 105 aa, Glycine max
  unsure (1)..(105): unsure at all Xaa locations
  Clone ID: TF_LIB4164-060-R1-N1-B1.pep
YSEYRFKCLKKEKEKGKQKKNLEKTTVMKDKQILLWLNHSKLLKFWLFIFWKHISYASTVMNRSAQQRVALNGIQKTINTIIMVRNQXISNIKWQEPKSRKAKGN

SEQ ID NO: 30406 - protein, 143 aa, Glycine max
  Clone ID: TF_LIB4391-012-R1-K1-E9.pep
TNEDSFHHIAEFRPWIITNKHATECLPALDMSKSTPTQELVAKDLQGFEWRFKHIFRGQPRRHLLTTGWSTFVTSKRLVAGDTFVFLRGNNGELRVWSEGVLLLCRAACHHLVISSQSMPLGVLATASHGCSNSDSFLLIISQ

SEQ ID NO: 30407 - protein, 349 aa, Glycine max
  Clone ID: TF_GmC88076_1.pep
MKKKSSIKAELWHACAGPLVKLPPSGTHVIYFPQGHSEQVSASLNRDVHSQIPNYPNLPSKLLCLLHTLTLHADPQTDQVYAQITLQPLPSFDKDALLRSDLALESTKPPPDFFCKQLTASDTSTHGGFSVPRRAAEKIFPPLDYSMQPPAQELVARDLHDTVWKFRHIYRGQPKRHLLTTGWSLFVSGKRLFAGDSVLFIRDEKQQLLLGIRRANRQPTNISSSVLSSDSMHIGILAAAAHAAANNSPFTVFYNPRASPSEFVIPLAKYYKSVYSKQASLGMRFRMMFETEDSGTRRHMGTVTGISDLDPVQWKNSQWRNLQVGWDESTAGEKRNRVSIWEIEQLLHF

SEQ ID NO: 30408 - protein, 73 aa, Glycine max
  unsure (1)..(73): unsure at all Xaa locations
  Clone ID: TF_GmC86745_3.pep
MKLSSSGFNPPAEEEGEKXVXNSELWHACAGPLVSLPPLGSREVYFSQGHSEQGAASTTREIDAHXIPNYPNF

SEQ ID NO: 30409 - protein, 79 aa, Glycine max
  unsure (1)..(79): unsure at all Xaa locations
  Clone ID: TF_701099624H1.pep
VTDDVYAQITLVPESNLDDPMNPDPCTAVPPSAPVHSFIKXLTASDTSTHGGFSVLRQHAMECLPALDMSQPGPSLELV

SEQ ID NO: 30410 - protein, 988 aa, Glycine max
  unsure (1)..(988): unsure at all Xaa locations
  Clone ID: TF_GmC570_1.pep
ETDEVYAQMTLQPVNKYEKEAILASDMGLKQNRQPTEFFCKTLTASDTSTHGGFSVPRRAAEKIFPPLDYSMQPPAQELVAKDLHDNTWAFRHIYRGQPKRHLLTTGWSVFVSTKRLFAGDSVLFIRDEKQHLLLGIRRANRQQPALSSSVISSDSMHIGILAAAAHAAANNSPFTIFYNPRASPSEFVVPLAKYNKVTYTQVSLGMRFRMMFETEESGVRRYMGTITGINDLDPVRWKSSQWRNIQVGWDESTAGERPSRVSIWEIETVLTPFYIXRPRFLRKKIPRESGVLDGVMFQAPIMIRVGQTLANHVGLSIKITPIPPLFGKVELMNMHNKNQSTSAHLLVEHSINLIKPLPGEVPINSTNPLCSIQITXSFSGEFESRQLHSTDSNHATLKVACVMSXQLQQLQHQLHLKRQQQHRQHQHQLLGIEQQLQVHSLLDVAIYHLQQQREQHLPERQNLAWMCKLAPQLGQKAKXERQVINRMGKFTYNEVPQMSLDGDLGQVPDSNHSFVAVKPARDGTTTNPIQLNVSXNPTELQLQLQLQQKLQQQQQHQQRLLSTSTPLLLSQLLQQQNTHQQNQQLPQPLPPISQHQPQQLGNNAFSTEKLLNSNNLSSYLMQSQKVSMNHPQNTQKSLTITRAPSTLTEGDAPSCSTSPSTNNCQVTPPNLLKRNQQLPATLRGSLIVEPTSNLIQELHSKPDTQIKQEFLNVKGPDQLKYKGTITDQLEASSGTSYCLDPPGNVQQNLPLSNFCMEGDVQSHPRNSLPFDSNLDGLTPDTMLSRGYDSQKDLQNLLSNYGGAPRDIETELSTADISPQSFGVPNMPFKPGCSSDIGINDPGVLNNNNGLWANQTPRMRTYTKVQKRGSVGRCIDVTRYKGYDELRHDLARMFGIEGQLEDPLRTDWKLVYVDHENDILLVGDDPWDEFVSCVQSIKILSSAEVQQMSLDGDLGGNVPIPNQAYSGTDSGNAWRGQYEDNSAASFNR

SEQ ID NO: 30411 - protein, 619 aa, Glycine max
  unsure (1)..(619): unsure at all Xaa locations
  Clone ID: TF_GmC318_1.pep
AIPLAKYVKAVYHTRVSVGMRFRMLFETEESSVRRYMGTITGISDLDPVRWQNSHWRSVKVGWDESTAGDRQPRVSLWEIEPFTTFPMYPSPFPLRLKRPWLPGLHSFHGMKDDDFGPKSTLLWLRDPDRGLPSLKFLGIGINPWMQPRFDLTIXNMQTDMYQAAAVQDIRSFDPSSKQSASLLPFQQPQNFPNRTAALMQAQMLQQSQPQQIFGNTQENQHSPQSQAHLQQHLQHQHSFNSQHHHHHQQQQQRQQHQVVDNQQISSAVSTMSQFVSAPQPQSPPMQVISSMCQQQNFSDSNGNTVTTIVSPLHSILGSFPQDETSHLLNLPRTSSWIPVQNSSGWPSKRVAVDPLLSSGASQCVLPQVEQLGQPQSTMSQNAISLPPFPGRECSIDQEGSNDPQNHLLFGVNIEPSSLLMPNGMSSLKGVCGNNGSSTLPYQSSNYLNTTTRTDSSLNHGMTPNIGDSGFLQCLEEAGQGNPLNKTFVKVYKSGSFGRSLDITKFSSYHELRGELARMFGLEGELEDPVRSGWQLVFVDRENDVLLLGDGPWPEFVNSVWCIKILSPQEVQQMGNNGLELLNSFPIQRLSNGICDDYVSRQDPRNLGTGITTVGSLDY

SEQ ID NO: 30412 - protein, 132 aa, Glycine max
  Clone ID: TF_GmC630_6.pep
MATSEVSIKGNSVNGKGDNSSGDARNSGGEAQNASSSSSSARGNVVSSACAFFFLVSDAEAALYRELWHACAGPLVTVPRERERVFYFPQGHIEQVEASTNQVAEQHMPVYDLPPKILCRVINVMLKVVTNA

SEQ ID NO: 30413 - protein, 667 aa, Glycine max
  unsure (1)..(667): unsure at all Xaa locations
  Clone ID: TF_GmC340_4.pep
MASAAPGATNDALYKELWHACAGPLVTLPREGERVYYFPQGHMEQLEASMNQGLEQQMPSFNLPSKILCKVVNVHLRAEPETDEVYAQITLLPEADQSEVTSPDDPLPESPRCTVHSFCKTLTASDTSTHGGLSVLRRHAXIDCLPPLDMTQQPPWQELVATDLHGNEWHFRHIFRGQPKRHLLTTGWSVFVSSKKLVAGDAFIFLRGENGELRVGVRRLMRQQSNVPSSVISSHSMHLGVLATASHAIATGTLFSVFYKPRTSRSEFIVSVNKYLEARSHKLSVGMRFKMRFEGDEIPERRFSGTIVGVGDNKSSSVWADSEWRSLKVQWDEPSSILRPDRVSSWELEPLVSTPPTNPQPSQRNKRSRPPILPSTMPDSSLQGVWKSPVESAPFSYCDHQHGRDVYPSTNFNSTATGFLGFGGNCYASNKSIYWSSRMENSTESFSPVALKEFGEKRQGTANGCRLFRIQLHDNSNSNEESLPMVTLSGRMGDDGPLPSLDAESDQHSEPSNVNRSDIPSVSCDAEKSCLRSPQESQSRQIRSCTKVHMQGMAVGRAVDLTRFDGYEDLLRKLEEMFDITGELCGSTKKWQVVYTDNEDDMMMVGDDPWLEFCSIVRKIFIYTAEEVRKLSPKIGLPISEEVKPSKMDSEAVANPEDQSSIVGPGC

SEQ ID NO: 30414 - protein, 711 aa, Glycine max
  unsure (1)..(711): unsure at all Xaa locations
  Clone ID: TF_GmC715_1.pep
ACVLVSSLLTWFCFVAGLKDDDLYRELWKLCAGPLVDVPRNGDRVFYFPQGHMEQLQASTDQELNQEIPHFNLPAKIFCRVVNIQLLAEQDTDEVYACIALRPESDQTEPTNPDPNVVXPQNYIISKLEVXLTASDTSTHGGFSVLRKHATECLPELDMTQSTPTQELAAKDLHGFEWKFKHIYRGQPRRHLLTTGWSTFVASKRLVAGDAFVFLRGEHGQLRVGVRRLARQQSPMPSSVISSQSMHLGVLATASHAVMTRTMFLVYYKPRTSQFIVGLNKYLEAVNNKFSLSMRFKMRFEGDDSPERRFSGTIVGVGDVSAGWSNSQWRSLKVQWDEPATIPRPDRVSCWEIEPFVASTALNVTQPAVKGKRSRPADVLSSAASGFWYHGSSNELSQLGAAAEVQSKENQVVPCSLRQKDIINSNPINANNSSISTRVRMEGVWPSSPHLNATPNLFSDPNNNNSNNGVSARSLISGYPNVPSRSSDGPTCDGVEDGKKTENSLDCWLFGVNLTNNCSNVITTPSEREQRGPSSSVVLSGPKESIPAAACETERVQTPNYSLSNKGQKQIISEASPNQWQNKQATVLSMRTRTKVQMQGVAVGRAFDLTTLSGYDDLIDELEKLFEIRGELRSQDKWAVTFTDDENDMMLAGDDPWPEFCNMVKRIFICSREDLKKMKCCKLPASSSEVEEILLSPDSQNRDETQQSHMP

SEQ ID NO: 30415 - protein, 574 aa, Glycine max
  unsure (1)..(574): unsure at all Xaa locations
  Clone ID: TF_GmC769_2.pep
IILSVVQATYVLFFLYLCKSYLCTIFPLLLHKPPLFCRYMGTITGISDLDPVRWPNSHWRSVKVGWDESTAGERQPRVSLWEIEPLTTFPMYPSLFPLRLKRPWHPGTSSFHDGRDEATNGLMWLRGGPGDQALNSLNFQGSGLLPWMQQRMDPTLLANDHNQHYQAMFASGLQNLGSGDLMRQQIMNFQQPXNYLQQSGNPNPPLQLQQPQAIQQSVSSNNILQPQAQVMAENLSQHLLQKSHNNREDQTQQQQQQRHTYQDTVLLQSDQLHQRQHSGLPSPSYSKPDFLDSSMKFPASVSPGQNILGSLCPEGSGNLLNLSRSSQSMLTEQLPQQSWAPKFTPLQINAFGNSMQHVQYSGKDTAMVPPHCNPDSQNPILFGVNIDSSGLLLPTTVPRYTTASAEIDASAMPLGESGFQSPLYPCVQDSSELVQSAGQVDPQNQTRTFVKVYKSGSVGRSLDISRFSSYHELREELAQMFGIEGKLEDPLRSGWQLVFVDRENDVLLLGDDXPWESFVNNVWYIKILSPEDIHKMGEQALESLGPSPGQRLNSTGADSHEIVSGLPSIGSLEY

SEQ ID NO: 30416 - protein, 208 aa, Glycine max
  unsure (1)..(208): unsure at all Xaa locations
  Clone ID: TF_GmC88076_3.pep
MKTTQQPEAPQGDPCEEKKKSINPELWQACAGPLVNLPPSGTHVIYFPQGHSEQVAASLNKDPHSQIPNYPNLPSKLLCLLHNLTLLADPETDEVYAQITLQPVPSFDKDALLRSDLALKSSKPQPDFFCKQLTASDTSTHGXGFSVPRRAADKIFPPLDYSMQPPAQELVARDLHDTVWTFRQFYRGQPKRHLLTXGWSLFVSGKRL

SEQ ID NO: 30417 - protein, 601 aa, Glycine max
  Clone ID: TF_GmC339_1.pep
RLVPLTRNEGDFEDDAVGGINGSENKDKSPSFAKTLTQSDANNGGGFSVPRYCAETIFPRLDYSADPPVQNILAKDVHGETWKFRHIYRGTPRRHLLTTGWSSFVNHKKLVAGDSIVFLRAEKDDLRVGIRRAKRGIGIGGGPEAPAGWNSGGGIRPMPYGGFSAFLREEDSQLLRNGLSPNAKGKVRPEAVIEAATLAANMQPFEVVYYPRASAPEFCVKANLVRAALQVRWCPGMRFKMPFETEDSSRISWFMGTISSVNFADPRWPNSPWRLLQVTWDEPELLQNVKRVSPWLVEIVSNMPTIHLSHYSTQQKKPRFPQHPDFSFDGQISLPAFPSNFLGPSNPFGCLAESTPAGIQGARHANYGISLSNLHFNKLQSGLFQAGFPPLDHTASPVLRVSSNNAATMQKVGTGDNVSCLLSMSTATQPSKKVDDVKAPQLVLFGQTILTEQQISLNTSAKTDPTRNNSFDGNADKMCKFSDGFGYALHPQGSSLERLQWYKDQQKETMASLETGHCKVFMESEDIGRTMDLTMLGSYDELYRKLADMFGIEKSVVLSHMLYRDTTGAVKHIGDEAFSEFTKTARRLTILMDSNSDGRGI

SEQ ID NO: 30418 - protein, 99 aa, Glycine max
  Clone ID: TF_LIB3242-311-Q1-J1-H3.pep
MATSEVSIKGNSVNGKGDNSSGDARNSGGEAQNASSSSSSARDAEAALYRELWHACAGPLVTVPRERERVFYFPQGHIEQVEASTNQVAEQHMPVYDLP

SEQ ID NO: 30419 - protein, 701 aa, Glycine max
  Clone ID: TF_GmC896_1.pep
MKEGEKVLDPQLWHACAGGMVQMPQMNSKVFYFPQGHAEHAHTNIHLRLPPFILCNVEAVKFMANPETDEVFAKLSLLPLRNSELGADSDGAGGDDVAEPSCCEKPASFAKTLTQSDANNGGGFSVPRYCAETIFPRLDYTAEPPVQTVVAKDVHGETWRFRHIYRGTPRRHLLTTGWSSFVNQKKLVAGDSVVFLRAENGDLCVGIRRAKKGISEGSGSGSSSVWSSASGSGNGNCGIGPYGPFSFFLKEENKMLRNGCGGNLSGRVKVRAEDVVEAVTLAASNKPFEVVYYPRASTPEFCVKASSVGAAMRIQWCSGMRFKMAFETEDASRISWFMGTIASVQVVDPICWPNSPWRLLQVTWDEPDLLQNVKRVSPWLVELVSNIPLINFTPFSPPRKKLRPQHPDFPLDVQFPIPMFSGNQLGPNSPLCGFSDNAPAGIQGARHAQFGKSLSDLHLNNKLQLGMLPTNIHQLGVYNEISNGNMMTNHDKSKESLSCFLTMGKSTKSLEKSDDVKKHQFLLFGQPILTEQQISSCSGDVLSHRKRSVSDDKDKAKCLMDDSQSTLSQQFSPGKASSAEFSWQLGLDTGHCKVFLESEDVGRTLDLSLFGSYEDLYRRLAIMFGIERSEILNHVLYHDAAGAAKKTGEEPFSDFMKTAKRLTILTDSSSKNIKRAFITGTRNGEHGLDASNKTGPLSIFA

SEQ ID NO: 30420 - protein, 89 aa, Glycine max
  unsure (1)..(89): unsure at all Xaa locations
  Clone ID: TF_GmC82302_1.pep
MKAPSNGYLPNSGEGERKTINSELWHACAGPLVSLPPVGSLVVYFPQGHSEQVAASMQKEADFIPSYPYLXIQXICMLHNXAVHADPXT

SEQ ID NO: 30421 - protein, 134 aa, Glycine max
  Clone ID: TF_LIB4280-026-R1-K1-G4.pep
PRVRFCRVLDVKLHAEEGSDEVYCQVVLVPESEQVQQKLREGEFDADGEEEDAEAVMKSTTPHMFCKTLTASDTSTHGGFSVPRRAAEDCFPPLDYSQQRPSQELVAKDLHGQEWRFRHIYRGQSQRHLFTTRV

SEQ ID NO: 30422 - protein, 229 aa, Glycine max
  unsure (1)..(229): unsure at all Xaa locations
  Clone ID: TF_LIB4390-057-R1-K2-C10.pep
VKAVYXTRVSVGMRFRMLFETEESSVRRXGWDESTAGERQPRVSLWEIEPLTTFPMYPSPFPLRLRRPWPSGLPSLYGLKDGDMGIGSPFMWLQGGLGDQGMQSLNFQXXGVTPWMQPRLDASIPGLQPELYQAMASSAFQEIRTMDPSKSSQSLXQFQQTSNVPSAHASEVQXQYYHSLSLKHPSTNYQENQVPAQSQLLQQQLHRYHPYYDPRQQQQQLKNLPVQQQ

SEQ ID NO: 30423 - protein, 92 aa, Glycine max
  unsure (1)..(92): unsure at all Xaa locations
  Clone ID: TF_GmC86745_1.pep
CHESCLNCYLVFTSNCFIFSLSGQPKRHLLTTXWSVFVSAKRLVAGDSVLFIWNEKNQLLLGIRRANRPQTIMPSSVLSSDSMHIVFLICRH

SEQ ID NO: 30424 - protein, 491 aa, Glycine max
  Clone ID: TF_GmC591_1.pep
RFRHIYRGQPKRHLLTSGWSLFVNAKKLVAGDSCIFVRGESGELRVGIRRAAENLSNISQSSSLISGHSMQLGILTNASNAVGNRTMFLVYYRPWTNPFEFIVHLQTYLKSTLQDYPIGTRVQMQHEVEESLRRLAGTIIGNEDIDSIRWPGSAWRRLKVQWDAIVEDKMHPERVCPWWIEPLESAKEKKQVPALPTKKKGHALLNQRSLPGISGFGKNDVHQNSAGPSSQTRRADGDLQGQDYSGLSPPQPLQRAPSTDIIRPSKVPIRGSRFGKENRNQHPFLKQDPLHKSLGRSMSLTHEDLSITSSNLTSIGSESLGMPSTESRGENDAPFGQPGSSSTFKLFGVNLIDSSPEIPSVNFVDLNKTSSLPSSPPMGVAPGKTCKKCRCVNNRSCTKVLKLGNALGRAVDLARFNGYTELIAELDSMFDFQGTLISGGSGWHVTCLDDEGDMMQLGDYPWQDFLGVVQKMIICPKEGTDNLKPGSSANP

SEQ ID NO: 30425 - protein, 74 aa, Glycine max
  Clone ID: TF_uC-gmflminsoy056g07b1.pep
MITQPPDAAPAVAPNSGEGGEKKSINAELWQACAGPLLNLPSPGTHVVYFPQGHSEQVAASLKKDVDAQVPNYT

SEQ ID NO: 30426 - protein, 104 aa, Glycine max
  unsure (1)..(104): unsure at all Xaa locations
  Clone ID: TF_LIB4200-008-Q1-K1-G8.pep
MAHLGCCNLGGPGSSGTSLPEKGLKDDDLYRELWKLCAGPLVDVPRTGDRVFYFPQGHMEQLQASTDQELNQEIPHFNLPAKIFCRVVNIQLLAEXRTDEVYAC

SEQ ID NO: 30427 - protein, 256 aa, Glycine max
  unsure (1)..(256): unsure at all Xaa locations
  Clone ID: TF_GmC88076_2.pep
MCVLTTIIILVGAEKKKSINPELWQACAGPLVNLPPSGTHVIYFPQGHSEQVAASLNKDPHSQIPNYPNLPSKLLCLLHNLTLLADPETDEVYAQITLQPVPSFDKDALLRSDLALKSSKPQPDFFCKQLTASDTSTHGGFSVPRRAADKIFPPLDYSMQPPAQELVARDLHDTVWTFRHIYRGQPKRHLLTTGWSLFVSGKRLLAGDSVLFIRDEKQHLLLGIRRANRGTHHISSSVVSSDSMHIXXLAAAAHAA

SEQ ID NO: 30428 - protein, 712 aa, Glycine max
  Clone ID: TF_GmC1058_1.pep
MAGLIDLNNATEDDETPSSGSSSSSSSSTVCLELWHACAGPMISLPKKGSVVVYFPQGHLEQHLHDFPLPASANIPSHVFCRVLDVKLHAEEGSDEVYCQVVLVPESEQVQQKLREGEFDADGEEEDAEAVMKSTTPHMFCKTLTASDTSTHGGFSVPRRAAEDCFPPLDYSQQRPSQELVAKDLHGQEWRFRHIYRGQPRRHLLTTGWSAFVNKKKLVSGDAVLFLRGEDGELRLGIRRAAQLKSGSTFSALSGQQGSPTSLMDVVNALSARCAFSIHYNPRVSSSEFIIPIHRFVKSLDYSYSAGMRFRMRFETEDAAERRFTGLIVGIADVDPVRWPGSRWRCLMVRWDDLEATRHNRVSPWEIEPSGSASTANNLMSAGLKRTKIGLPSAKLDFPVSNVIGTSDFGESLRFQKVLQGQEMLGVNTTYDSFNAQSHQLSDLRRCYPGSNYPRIAATGNSIGISQVSSNVSNNGIGFSESFRFQKVLQGQEILPSQPYGRALSVDEACGNGRFGLFDGFQAMRSRNGWSSHVSNNSSHLHPPVPSGQVSSPSSVFMFQQAVNPVLNSDYNNQIGQVMGDKVHQRVSYASEVKGGKFVSTPYEPLLRGLSQEGTNSFGLSNFHNQLDSSRSHDSVSVLRASQELVPSCKSRCRVFGFSLTEGAPVASKEATDSSAVACAGPSFTRHVEDDFHPGHSLRSKAVASYCTKVLY

SEQ ID NO: 30429 - protein, 237 aa, Glycine max
  Clone ID: TF_GmC131_1.pep
YGCEKTTEGGPWRMLQVNWDEPEVLQNAKRVSPWQVELVSLPFALHTVYSPNKRLRSDQGSGLLSNREGDPFFPMTGFPNSTMEHMTGFPNSTVGHMDKSLLSYDTFPAGMQGARHDLFSPSSFSNFLNDKSYLYMGSGSFGNNPVQSLGTVTTELNMSSSQSDDLSPHSQSSFHSFAREFAGTRNCDTKVASGSILLFGKIIQPAESDLHDGDCMERDGSRGSNKLKTVEACYFSK

SEQ ID NO: 30430 - protein, 280 aa, Glycine max
  Clone ID: TF_GmC153313_1.pep
NPRASPSEFVIPLAKYVKAVYHTRVSVGMRFRMLFETEESSVRRYMGTITGISDLDPVRWPNSHWRSVKVGWDESTAGERQPRVSLWEIEPLTTFPMYPSPFPLRLRRPWPSGLPSLYGLKDGDMGIGSPFMWLQGGLGDQGMQSLNFQGLGVTPWMQPRLDASIPGLQPELYQAMASSAFQEIRTMDPSKSSQSLLQFQQTSNVPSAHASEVQRQVLPQSQPQNTLLHNYQENQVPAQSQLLQQQLHRYHPYSDPRQQQQQLKNLPVQQQLPNVISPLS

SEQ ID NO: 30431 - protein, 173 aa, Glycine max
  unsure (1)..(173): unsure at all Xaa locations
  Clone ID: TF_GmC231_12.pep
MIRHVDVTMDQVWGWLSCLQGLCQQKSEGVDRPQWSTFSDVNYSGSLSSTFGSKALATEGEKENLMTDYXLKGLEVCADTIVGNAMLRGISGGQRKRVTTWEMLVGLANAXFMDEISTGLDSSTTYQILNSLKQCVHILKGTTVISLNFNEISTGLDSSTTYYSLLHFNDMLV

SEQ ID NO: 30432 - protein, 70 aa, Glycine max
  unsure (1)..(70): unsure at all Xaa locations
  Clone ID: TF_GmC630_9.pep
MTSLEVTMKGNCLNHNDGGATEPHSPSTAKDAEAALFRELWHACAGPLVTVPRERERVFYXFPQGHTEQA

SEQ ID NO: 30433 - protein, 202 aa, Glycine max
  unsure (1)..(202): unsure at all Xaa locations
  Clone ID: TF_GmC896_2.pep
THSVFFVVVPMKEGEKVLDPQLWHACAGGMVQMPQVHSKVFYFPQGHAEHAHTTIDLRVPPFILCNVEAVKFMADPETDQVFAKLSLVPLRNSELGPDSDSAAGDDAAEPSSCEKPASFAKTLTQSDANNGGGFSVPRYCAETIFPRLDCTAEPPVQTVVAEDVHGETWRFRHIYRGTPRRHLLTTGGSSFXVNQKKLVAGG

SEQ ID NO: 30434 - protein, 292 aa, Glycine max
  Clone ID: TF_GmC519_1.pep
TVRMCATQATSRATSVILRQSMHLGVLALIPHAVATQTLFVVYYKPRTSQFIIGVNKYLEAMDKKFSVGMRFKMRFEGDDSAETDKRFSGTIVGVEDISPHWVNSKWRSLKVQWDEPAAVPRPDRVSPWEIEPFVASASTPSVQPTMVKTKRPRPPSETPDVDTTSVASVFWDAGLQQADMAQKNTEGSWLSSPHSSCPSHLFQDVTDDSKIVSAWPVSKPHSSKLNNDHVLDQVDKESKVETATSYRLFGIDLIDPSRNSPSVEKASAQAVNVPKVTTEGCTITLSHSVIW

SEQ ID NO: 30435 - protein, 255 aa, Glycine max
  Clone ID: TF_GmC326_8.pep
DAVTNFKPLAGADDAEAEFLSTHSKSEIVDMLRKHTYDNELQQSTRGGRRRRDAETASSGAFDAKAREQLFEKTVTPSDVGKLNRLVIPKQHAEKHFPLSGSGGGALPCMAAAAGAKGMLLNFEDVGGKVWRFRYSYWNSSQSYVLTKGWSRFVKEKNLRAGDAVQFFKSTGLDRQLYIDCKARSGKVNNNAAGLFIPVGPVVEPVQMVRLFGVDLLKLPVPGSDGIGVGCDGKRKEMELFAFECSKKLKVIGAL

SEQ ID NO: 30436 - protein, 185 aa, Glycine max
  Clone ID: TF_GmC892011_1.pep
GAGTASAWALPGLVGFYPRAESPGVGVWSSAVRGAFWGRWCPGVWGGLPSATEDSSGTSWFMGTIASVQVLDPIRWPNSPWRLLQVSCLGPVLLQQPLRVSPWLRACGPTGPLALPAAFSPPRKKLRFPLDVQFPIPSFSGNPFGSSSSSSPFCCLSDNAPAGIQGARHSQIGISLSDLHLNNKL

SEQ ID NO: 30437 - protein, 273 aa, Glycine max
  Clone ID: TF_GmC229993_1.pep
FMGTISSVQVADPILWPDSPWRLLQVVWDEPDLLQNVKCVNPWLVELVSNMPTFNLSAYSPPRMKQRFLQDPYFQVINQLPMPSFSSNLLNYTNSLCTIQDSNSSGGIQGARHAQFGLSPSDFPFNKLPADMLLGGFSRLDHAAAQPIRPPCGTYKNNTTTKANVGISCLLTVGNPGQNFKESNETKAPHILLFGKLIQTEQKSSNTSSANTNGNSVSEGNSHKTSNASDGLGFGLHQGSPIENNSDGGFPWYKDQHKSDLGTDNVNTLCIAL

SEQ ID NO: 30438 - protein, 62 aa, Glycine max
  Clone ID: TF_GmC749534_1.pep
MAGVGDGDLYTQLWKLCAGPLVDVPRQGERVFYFPQGHMEQLQASTNQGLNQEIEWVVLKKK

SEQ ID NO: 30439 - protein, 116 aa, Glycine max
  unsure (1)..(116): unsure at all Xaa locations
  Clone ID: TF_jC-gmXLIB3564P118cd01b1.pep
AYSFSLAQYEEVVDNPQLFMFTLEKLHADMGTKXMIPIGGGRELYLHPLFDEVTSRGGIVKIIRERKWKDVPSVLNFPSTATDALIELRKYYAALLYHYEQIDFFKAREWDPTAPD

SEQ ID NO: 30440 - protein, 141 aa, Glycine max
  Clone ID: TF_LIB3242-287-Q1-J1-G12.pep
MTNYGDMNVTNKPNPDGSTNGFQSQLQVQQQNGWEQGSSRLRPTKPYPAPTARYQDIVRDANLFWGTLQAFHKILGTKYKVATVGGTSLDLHRLFVEVTSRGGIEKVIVDRKWKEVILTFNFKDTITSASFVVRKSYLSML

SEQ ID NO: 30441 - protein, 410 aa, Glycine max
  Clone ID: TF_GmC52418_1.pep
FEICMKLPQWALQILRQLAPEVSYRSLVALGIASIQGLPIASFEKDDAERLLFFYQNCEKDSCTNKNNIIFSSPPGWLKPPPPTRKRCEPRQEASPGLHEGVFAGQGGVCKLNEEEKDRKIVNGISMPLTPARQRLKVSAMRPIPHIRRHRMTPFCGPSETDGFDGTQVEAILPLVAPTKRTSIGSTSGTHRKSFSSAAQSKQVISLNPLPLKKHGCGRGPVQTCSEEEFLKDVMEFLILRGHNRLIPQGGLTEFPDAILNGKRLDLYNLYKEVVTRGGFHVGNGINWKGQIFSKMRNYTTTNRMTGVGNTLKRHYETYLLEYELAHDDVDGECCLLCHSSAAGDWVNCGICGEWAHFGCDRRQGLGAFKDYAKTDGLEYICPHCSVTNFKKKQNFANGYSQGLMSSRPL

SEQ ID NO: 30442 - protein, 371 aa, Glycine max
  Clone ID: TF_GmC1753_1.pep
MVFDICAQVLRQLAPNLAYRSLVMLGIASIQALPVASFSKDDAERLLFFCTRQEKENCPKDHVFSGIPSWLKPPPPSRKRSEPCSSSKSINASGRGVEAIGSHRQKFIVASMRPIPHSNRHKILPFSGLSEGTRYDGDHGKSNLPLALIKHNVSGPTSVTNRKSVSNSFQAHQIISLNPLPMKKHGCDRAPIRACSEEEFLRDVMQFLILRGHNRLIPPGGLAEFPDAILNAKRLDLFNLYREVVSRGGFHVGNGINWKGQVFSKMRNHTMTNRMTGVGNTLKRHYETYLLEYELSHDDVDGECCLMCHSSAAGDWVNCGICGEWAHFGCDRRQGLGAFKDYAKTDGLEYVCPRCSALKFSKKSQKTANGF

SEQ ID NO: 30443 - protein, 387 aa, Glycine max
  Clone ID: TF_GmC327_2.pep
MALEVKPEACGMADSKACDNGDPVLASHNEPATPLPAPADTNTEIMNVLEVENKVDEKQVAEPADNGNSNSKHMLFLDADHSYDGNESGTEEEQSAFMKELENFFRERSMEFKPPKFYGEGLNCLKLWRAVTRLGGYDKVTSCKLWRQVGESFKPPKTCTTVSWTFRGFYEKALLDYERHKIKGGELNVPVASHPEPINIENQASVSGRARRDAAARAMQGWHSQRLLGNGEVSDPIIKDRNSVSVQKREKQLKSINIHKRKKPSSPYMDNAVKAARSKPSKPQLDTTVIDIGPPADWVKVNVQKTKDCFEVYALVPGLLREEVRVQSDPAGRLVISGEPEHPNNPWGVTPFKKVVSLPSRIDPHQTSAVVTLHGQLFVRVPFEHLE

SEQ ID NO: 30444 - protein, 434 aa, Glycine max
  Clone ID: TF_GmC327_1.pep
MDNAQVLNKTKEGEYVSDVKSKAEETPQCDKRIENDANVWQINMDTAETTVAVNPKAFEVADSKTCLNGDSNSICPSHNEPNTPHAIPTEINSGLDNENRDNEKQAVVAHADNGHSISKNLYFLDPDDSYNGNESGTEEEQSAFMKELENFFRERSMEFKPPKFYKEELNCLKLWRSVHRLGGYDKVTSYKFWRQVGESFKPPKTCTTVSWTFRVFYEKALLDYERHKIKGGELNVPVASHPEPINIENQASVSGRARRDAAARAMQGWHSQRLLGNGEVSDPIIKDRNSVSVQKREKQLKSINIHKRKKPSSPYMDNAVKAARSKPSKPQLDTTVIDIGPPADWVKVNVQKTKDCFEVYALVPGLLREEVRVQSDPAGRLVISGEPEHSNNPWGVTPFKKVVSLPSRIDPHQTSAVVTLHGQLFVRVPFEHSE

SEQ ID NO: 30445 - protein, 208 aa, Glycine max
  unsure (1)..(208): unsure at all Xaa locations
  Clone ID: TF_GmC37930_1.pep
MEDGEKPSHGIADMDVVDATLQSHRVASDQVMVLQGHDIKNGDSDPAHVPATSAISNNQFELEDAKTVSHQELITPKPKEKNVREMKNVLNDTEMTDYDEYGTPLDRETFMKELETFYRERSLEFKPPKFYGEPLNCLKLWRAVIRLGGYDVVTGSKLWRQVGESFHPPKTCTTVSWTFRIFYEKALLEYEKHKREIGELQXPVGPFH

SEQ ID NO: 30446 - protein, 322 aa, Glycine max
  unsure (1)..(322): unsure at all Xaa locations
  Clone ID: TF_GmC85_1.pep
MSSAARTPGGEEGKHYPAPLAPHEGVVKDSTLFWDTLRRFHFVMGTKFMIPVIGGKELDLHVLYVEVTRRSGYEKVVAEKKWREVGSVFKFAATTTSASFVLRKHYFSLLYHYEQVHFFKARGPIYTPSADAFSGNSPSWRPELAIVEYSPKPMDNSPESRAEDTSCLSGNGTIEGKFDCGYLVSVKLGSEVLRGVLYHPEQXGSSPSIPNMRVPXVPINRKPHRSGRRKKNKRRWDPNYPKPNRSGYNFFFAEKHYTLKTLYPNREREFTKMIGQSWNSLSPEERMVYQNIGLRDKERYKRELTEYKEKMKLRQTSEVGRP

SEQ ID NO: 30447 - protein, 419 aa, Glycine max
  Clone ID: TF_GmC1306_1.pep
MASTSCVGNTSLSMKDSASRYSAYPLPLAKYEKRMDNPQLFMSTLEKLHAAMGTKFMIPIVGGRELDLHRLFVEVSSRGGIAKIIRERKWKDVTSVFNFPSTATNASFVLRKYYVSLLYHYEQIYFFKAREWDPIAPDVSQNQSTLPVPPPKMQFQQPLSETQPAVFQLSNVNAAKLPEAMAASSAGSPVIGVIDGKFESGYLVTVTIGSEKLKGVLYQAPQNPVLTASHHSASANNNNASASLGVHRRRRRKKSEIKRRDPAHPKPNRSGYNFFFAEQHARLKLLHHGKDREISRMIGELWNKLKESEKTVYQEKAMKDKERYRVEMEDYREKLKMGPVISDAVPLQQRLPEPDTDMLDEAEGDSPQTPEESSSGGSDYEDYNKTAERGFDMDALPVIGMGAETSYLGSEEKLSKGGL

SEQ ID NO: 30448 - protein, 271 aa, Glycine max
  unsure (1)..(271): unsure at all Xaa locations
  Clone ID: TF_GmC327_3.pep
MEFKPPKFYKEELNCLKLWRSVHRLGGYDKVTSCKFWRQVGESFKPPKTCTTVSWTFRVFYEKALLDYEXHTTKGGELNVPITPLAEPINIENQSVQGSASSGRARRDAAARAMQGWHSQRLLSNGEFSDPIIKIYLNARNHRTPLMLSKWHTVNHXRPQLRHISDTSVVDIGPPADWVKINVQKTKDCFEVYALVPGLLREEVRVQSDPAGRLVISGEPEHSDNPWGVTPFKKVVSLPSRIDTQQTSAVVTLHGQLFVRVPFESNQNREG

SEQ ID NO: 30449 - protein, 302 aa, Glycine max
  Clone ID: TF_GmC1243_1.pep
MANRWWAGNVGMIREQELMENSNNNNNNNNATTTTPTNSSNSNTNANTNTNTTEEEVSRDNGEDQNQNLGSHEGSEPGSSGRRPRGRPAGSKNKPKPPIVITKESPNALRSHVLEIASGSDVAESIAAFANRRHRGVSVLSGSGIVANVTLRQPAAPAGVITLHGRFEILSLSGAFLPSPSPSGATGLTVYLAGGQGQVVGGNVAGSLVASGPVMVIAATFANATYERLPLEDDQGEEEMQVQQQQQQQQQQQQQQQQQQSQGLGEQVSMPMYNLPPNLLHNGQNMPHDVFWGAPPRPPPSF

SEQ ID NO: 30450 - protein, 120 aa, Glycine max
  Clone ID: TF_uC-gmflLIB3260P050e10a1.pep
KKNPPGGHFPNPPPPGGGGFFYLHGAPPGFPARKTGVVAHPPYVGVGPPFGPPGFSLYVSGPYFVGICEGVHLFPRKHLFPCFCPALIRPPIGKTGTPPGSGPEFPGGPPGAPPGPKFRK

SEQ ID NO: 30451 - protein, 244 aa, Glycine max
  unsure (1)..(244): unsure at all Xaa locations
  Clone ID: TF_GmC120058_1.pep
MAGLDLSTASPFVQSLHRPDFNQQHDSGEDAKQSAEDGPHHQGDVVGRRPRGRPAGSKNKPKPPVIITRESANTLRAHILEVANGCDVFESVASYARRRQRGICILSGSGTVTNVSLRQPASAGAVVTLHGRFEILSLTGSFLPPPAPPGATSLSIYLAGGQGQVVGGSVVGEFXAAGPVIVMAASFTNVAYEXRLPLEEEENRLRYLGVAGNNSNPFPDPSSGLPFFNLPMNVQLPCGCLGRE

SEQ ID NO: 30452 - protein, 586 aa, Glycine max
  Clone ID: TF_GmC873_1.pep
GPEFPARPRVRNEGNENPLEEFGTLEEHVPFHEEQHAMVHHQQGQAEEEDHQVPFCEEIQGDEEGGDGVGVDDEMSNVFLEWLKSNKDSVSANDLRNVKLKKATLESAARRLGGGKEAMKQLLKLILEWVQTSHLQNKRRKENNGSSISSVLQAQFQDPSGQNNNQNTQSGSFAPESNTCFNNQTPWLSSQTFATDQAPLMVPPQQFPQPMVGYVGDPYTSGAASNNISATHNHNNSNPYQPGAEQYHMLESAHSWPHSLFNVASNYSQSFGDNNGLNPHGGFGGGGYGNNQYPYQFFHGPGDRLMRLGPSATKEARKKRMARQRRFLSHHRHHSGNHQNQGSDPHARLGGDNCNTALAAPHHANPSANWMYWQAMIGGAAGPLAPVIPAEPPVVQPVVDRSAMQTQNCHQNRVASDRRQGWKPEKNLRFLLQKVLKQSDVGSLGRIVLPKKEAETHLPELEARDGISITMEDIGTSRVWNMRYRYWPNNKSRMYLLENTGDFVRANGLQEGDFIVIYSDVKCGKYMIRGVKVRQQGVKPETKKVGKSQKNQHGTGTNASTTACTAANNGTPSSPKTKAEKSSKLI

SEQ ID NO: 30453 - protein, 772 aa, Glycine max
  Clone ID: TF_GmC873_2.pep
NCHVHVKVLIGASGFGEDRISASLSSLLWVVTEPNPIGFGTMENEHTLAVAEREMWLNSDQDEFLGVNDASMFYADFPPLPDFPCMSSSSSSSSALPFPVKTMTCSTRTTTTTTTSSSSSSSSWAVLKSDAEEDAEKNHCNRYMHDQLDATLSSTASMEVSQQKNLDPGLGGPVGECMDDVMDTFGYMELLEANDFFDPASIFQNEDNENPLVDFGTLEQHVPLHDEQHEMLHHQQGRTEEVDHQVPVCEEIQGDEEGGDGVGVDDEMSNVFLEWLKSNKDSVSANDLRNVKLKKATIESAARRLGGGKEAMKQLLKLILEWVQTSHLQNKRRKENNGSSISSALQAQFPDPSVQNNQNTQSGSFSPESNACFNNQTPWLSPQTFATDQAPLMVPPQQFQQPMVGYVGDPYTSGAASNNITTSHNHNSNNPYQPGAEQYHMLESAHSWPHSQFNVACHYSQSFGDNNVIFPQGGFGGGYGNNQYPYQFFHGPGDTLMRLGPSATKEARKKRMARQRRFLSHHRHHNGNHQNSGSDPHARLGGGDNCTTGLAAPHHANPTANWMYWQAMTGGAAGPLAPPAEPPAVDRSALQTQNCHQSRVASDRRQGWKPEKNLRFLLQKVLKQSDVGSLGRIVLPKKEAETHLPELEARDGISITMEDIGTSRVWNMRYRYWPNNKSRMYLLENTGDFVRANGLQEGDFIVIYSDVKCGKYMIRGVKVRQQGVKPETKKVGKSQKNQHGTGTNASTTACTAANNGTPSSPKTKAEICSKLI

SEQ ID NO: 30454 - protein, 230 aa, Glycine max
  unsure (1)..(230): unsure at all Xaa locations
  Clone ID: TF_GmC283122_1.pep
MMMDQRQREKLLHKTEACAFVAGVVPELSLVTVPGNNTNNVNNNNNVVSHSQSNGSGRIQENNHHLGLVAAVTSAFGTVQRKKRMARQRRSTKPTSLMNHLNNHKHNKPRSLPSPSASSSYVPLSSATLQPAREIDQRRLRFLFQKELKNSDVSSLRRMILPKKAAEAFLSALESQEGIVISMDDIDGXHVWRFXYRAGLHIQRMYALENXGEFXNTHGLVWRFIMVTKI

SEQ ID NO: 30455 - protein, 514 aa, Glycine max
  unsure (1)..(514): unsure at all Xaa locations
  Clone ID: TF_GmC5693_1.pep
GSSLEANAGMVSQIRVARPPAEGRGRNQLLPRYWPRITDQELQQISGDSNSTIVPLFEKMLSASDAGRIGRLVLPKACAEAYFPPISQPEGLPLRIQDVKGKEWMFQFRFWPNNNSRMYVLEGVTPCIQSMQLQAGDTVTFSRMDPEGKLIMGFRKATNSTAVQLQKGCSETHLNALSKKWNSAGGDMSWHNIDMPESRKRDELPLPPVMVPEKKRTRNIGSKSKRLLIDSQDALELKLTWEEAQDLLRPPPTLHFLXPSFVALKNHFPRDLDKLLRLKKEFKYESLSARQRLALEHESSGLDALANAAILGDDASDSGRTPVVTTTKHPRHRPGCSCIVCIQPPSGKGKHKPTCTCNVCMTVKRRFKTLMMRKKKRQSEREAEIAQRNQLSWRTKDESEVDSTSRHLTPVDAAKGQLDLNCQPDREDVQAGPNSLSMTSLLEEANLPLETYLKRNGLSSLISEQQTNSASNVQAQTTNDSEVKHNEDCGTASVIHEQESSPEENSGQDKEQNN

SEQ ID NO: 30456 - protein, 544 aa, Glycine max
  unsure (1)..(544): unsure at all Xaa locations
  Clone ID: TF_GmC962_1.pep
SVGLKCLLLPLFEKVLRATVAGLIGRPVXPKPXPDAHFPLISQSEGVALRMQDVKGIEWTFEXRFWPYNKSRMYTLEGVTYVTSRAKEERGQIIKIEGSIHSSNAMLYSKCLKVASRVGHKVLDNGKKVRYLIKTGEIIDSSENWKKLKEATKKTEEAAAATTYNDGSKTYMXLHFNSNETHLELTYQEAQYLFRPSPVVKPQIITTEDQVFEEYEVTTVFVKRTIFSACSSGGKEQWAQCDDCSKWRKLPVDALLPPKWTCSENVWDSSRCSCSVPEELSSKELENLLKTNKDFKKRRIAESSKSIQEHEASGLDALASAAVLGENLVDTAESSAGATTKHPRHRPGCSCIVCIQPPSGKGRHKPTCTCNVCMTVKRRFKTLMLRKKKRQSEREADTAQKDQTLLKDEPDTNGAPRDDTSRLEKEVGLNKSQHQVGESSAGQIDLNSHPNREDMQVETTGLNMSSHLEPATNHTVGEFMNQNGLRNFNNEVQTGQNSSLHTPKSNGEGQRYFSDGRCFASIMWNQERKDEVHSQTNQSQNNLS

SEQ ID NO: 30457 - protein, 377 aa, Glycine max
  unsure (1)..(377): unsure at all Xaa locations
  Clone ID: TF_GmC5717_3.pep
MQNVIDSGGGCKGRDHIIALLICEDLMEEHLTPLAVTHLLQHTLRSLCIHENSQWVYAVFWRILPRNYPPPKWEGQGAYDRSRGNRRNWILVWEDGFCNFAASAAPEVNSGDCSTPPVYGNCEFQPYQGLQPELFFKMSHEIYNYGEGLIGKVAADHSHKWINKEPNDQEINFLSAWHNSADSHPRTWEAQFLSGIKTIALIAVMLXIRAVHKVIEPXHVVLLRKXFSYIESIPGVLLPHPSSSAYPYKIEGGGYGAPEQWHYQGGNNHHHLASPQQTELYDHHGHFNLPLKITPSMSSLEALLSKLPSVVPPTTTQQQPLLPSNSQQQQRRPLEFIMGMQKVAKEELEQEEVYRPIYIYVCVGGVIVAVQFLKKKP

SEQ ID NO: 30458 - protein, 119 aa, Glycine max
  Clone ID: TF_7796380.pep
QTTTTGGEQEILDDKEPMFEKPLTPSDVGKLNRLVIPKQHAEKYFPLSGDSGGSECKGLLLSFEDESGKCWRFRYSYWNSSQSYVLTKGWSRYVKDKRLDAGDVVLFERHRVDAQRLFI

SEQ ID NO: 30459 - protein, 149 aa, Glycine max
  Clone ID: TF_LIB4164-006-Q1-N1-B8.pep
QNCHQSRVASDRRQKEAETHLPELEARDGISITMEDIGTSRVWNMRYRYWPNNKSRMYLLENTGDFVRANGLQEGDFIVIYSDVKCGKYMIRGVKVRQQGVKPETKKVGKSQKNQHGTGTNASTTACTAANNGTPSSPKTKAEKSSKLI

SEQ ID NO: 30460 - protein, 185 aa, Glycine max
  Clone ID: TF_LIB4199-008-Q1-K1-F1.pep
QRPAGDTVTFSRMDPEGKLIMGFRKATNSTAVQETLPSNMPNGSHSSETSYSGVYENLPILSGYSGLLQSQKGCSETHLNALSKKWNSAGGDMNWHSIDMPESRKRDGLPLPPVMVPEKKRTRNIGSKSKRLLIDSQDALELKLTWEEAQDLLRPPPTVKPSIVMIEDHVFEEYEEPVFERGVYS

SEQ ID NO: 30461 - protein, 210 aa, Glycine max
  Clone ID: TF_GmC449061_1.pep
MNIVHQEHLVPAPESLTSAAGCGLLHQHQEAAGSNFIINNNHHHHQHHHHHTTKQLDFMDLSLGSSKDEGNLPGSSSSVYAHHHHAASASSSANGNNNNSSSSNLQQQQQQPAEKEHMFDKVVTPSDVGKLNRLVIPKQHAEKYFPLDSSANEKGLLLNFEDRNGKLWRFRYSYWNSSQSYVMTKCWSRFVEEKKLDAGDMVSFQRGVGE

SEQ ID NO: 30462 - protein, 71 aa, Glycine max
  Clone ID: TF_GmC928_1.pep
IWLHTIVNDLSFFHHFHFQGTWFFIHTSIFPCAGDFVRANGLQEGDFIVIYSDVKCGKYVRPFLIFHFSFS

SEQ ID NO: 30463 - protein, 646 aa, Glycine max
  Clone ID: TF_GmC5689_7.pep
VVAEEFLEICGMEGSIPTGFKWRSRREVVDWLTSTLSKQNLQGDRSVSAGHNLVPSHEATNDSVNEIIGLSAQITDDKDFPTSNSKLSNSDIVWSGVAWRCGKQLKHYPAFFRNGIKIAIQSFVFVMGKGENHYIAYVEDMYEDRRGQKKIKVRWFHHNQEVKGVVPVRNPHPREVFITPYSQVISSECVDGSATVLTREDFEKCMPFFSPTSRDRIHLCFRQFRSNKIKPFDLSKLRGYYAQPILSCLHLDSIQHPEFLAREDEELSAGDDVKVGVKRRRGDKGSPQSWISRQGVRKLSRNKQMMVYKTFQVANYARSERILLSRKQVECQPWSNHTYKVDDKIELLCQDSGIRGCWFRCTVVQVARKQLKVQYDDVQDEDGSGNLEEWIPSFKLARPDKLGMRHSGRPTIRPAPTYEEQELAVEVGSAVDAWWSDGWWEGVVTRIDNCGDDSVEVHFPGECLLMNVCKKDLRISRDWLGDSWINIKAKPEITKSIFTANNSFNTKLSVSPSIAKDVDSVGFANSCHGDPVSKKSNEPVVIKEENFVSCDGSDKEENFVSCDGSAEDGDCVQDNKPSSEKSTQADNIDTHINCDNEENCGDNDNDNNSNDGGGNKNDDDNGNKDMGVFGTSGPDQETVELMEVAV

SEQ ID NO: 30464 - protein, 166 aa, Glycine max
  Clone ID: TF_GmC1073_6.pep
FGSRARDRRFTQVATSEDEDEAPPPPPPPKQQSSVSAPEENRSKQQQRKRKRMKLQEEEEEEEEKEEEKKKKKRKIKDKQEERSNEEEEPPQEDAKPIGEPVRLSGKGRGRKKHYESFEYDGNQYMLEDPILFTPEDKDQKPYVAIIKDITQSLNGSMMVTGQWFY

SEQ ID NO: 30465 - protein, 105 aa, Glycine max
  Clone ID: TF_GmC44819_1.pep
MENHRRRTQVTTSDDEDEQEKEEVLKRSRPVEDAKPIGEPLKYSGKGKSKKWHYDSFEFNGIQYTIGDHVLFKPEEKGQKPYAGIINDITQGNNGNVVVTGQWFY

SEQ ID NO: 30466 - protein, 134 aa, Glycine max
  unsure (1)..(134): unsure at all Xaa locations
  Clone ID: TF_GmC986_3.pep
RWDRGVERKRRTRHMWKSPTRAHSSVTVDFSSSSSSSSSSSSSLKSSVDWFYKDGRKIIAGDCALFKPPKDRPPFIGISHRVTVGKENKWKXSVNWLXRPIEVRLVKDLLLESAPNKIFYSFHXEEIPATSLLH

SEQ ID NO: 30467 - protein, 216 aa, Glycine max
  Clone ID: TF_GmC126_2.pep
MAKTRPGRKDVDSYTIRGTSKIVRAGDCVLMRPSDTSKPPYVARVEKIEQDNRSNVKVRVRWYYRPEESIGGRRQFHGAKELFLSDHYDVQSAHTIEGKCVVHSFKNYTKLENVGAEDYYCRFEYKAATGAFTPDRVAVYCKCEMPYNPDDLMVQCEGCKDWYHPACMGMTIEEAKKLDHFVCSECSSDDDMKKPQATFFASLGADGKVEPKRRKR

SEQ ID NO: 30468 - protein, 193 aa, Glycine max
  Clone ID: TF_16996963.pep
FVTGLTNKMEERHHTKWLVKKKKVVPRSEPNLNPRAAVGPVVSKRKAMQATTTRLINRIWGEYYSNHLPEDAKEGIASELKDEDEVEEQEENEDDDNEETILLEGTPKAHSASKQTKKFSAETEIRWEGEPEGKTSSGYPVYKQAIIRGEVISVGRSVLVEVDETDEFPDIYYVEYMFESKIGRKMFHGRMMQ

SEQ ID NO: 30469 - protein, 216 aa, Glycine max
  Clone ID: TF_GmC126_1.pep
MAKTRPGRKDLDSYTIRGTNKIVRAGDCVLMRPSDTSKPPYVARVEKIEQDSRNNVKVRVRWYYRPEESIGGRRQFHGAKELFLSDHYDVQSAHTIEGKCIVHSFKNYTKLENVGAEDYYCRFEYKAATGAFTPDRVAVYCKCEMPYNPDDLMVQCEGCKDWYHPACVGMTIEEAKKLEHFVCSECSSDDDMKKPHATFSVSPGSDVKVEPKRRKR

SEQ ID NO: 30470 - protein, 218 aa, Glycine max
  Clone ID: TF_GmC237787_1.pep
MAKKRSASDATDDAQNDTVSLLPSQRKKPKHSAPNPDACFVGKPIPSAEARAKWPHRYPSEVKKKAPARSSEEVTSENSEVMLARCHYRQAKVDGVVYNLYDDAYVKAEDGKPDYIARIVEMFETVDKEQCFMAQWFYRAEDTVIKNHGDLVDKKRVFISDVKDVNPLDCIVSKVKIFKKNPSVDLASKKAKLPFCDYYYDMKYTVPYLTFSNLVNET

SEQ ID NO: 30471 - protein, 609 aa, Glycine max
  unsure (1)..(609): unsure at all Xaa locations
  Clone ID: TF_GmC1759_1.pep
AREKIEQGTHKSGRNVGLKAYVVCQVLEIVVKKEIKQAERKCTQVKIRKVIRPEDLSNERAYXTDIRDVYYSDETYIISVESIEGKCQVRKKNDIPECSALGGIFQNVFFCELLYDPATGSLKKLPANIKVKYSSGQTSDAAARKRKGKCIEGDGVSESTKEGKTLNDKRLATLDIFAGCGGLSEGLQQSGVSSTKWAIEYEEPAGDAFKANHPEALVFINNCNVILRAVMEKCGDTDDCISTSEAAELAAKLDEKEISSLPMPGQVDFINGGPPCQGFSGMNRFNQSSWSKVQCEMILAFLSFADYFRPRYFLLENVRNFVSFNKGQTFRLTLASLLEMGYQVRFGILEAGAFGVSQSRKRAFIWAASPEDVLPEWPEPVHVFSAPELKITLSENVQYAAVRSTANGAPLRAITVRDTIGDLPAVGNGASKGNMEYQNDPVSWFQKKIRGDMVVLTDHISKEMNELNLIRCQKIPKRPAXVSWRDLPEEKIKLSSGQVVDLIPWCLPNTAKRHNQWKGLFGRLDWQGNFPTSVTDPQPMGKVGMCFHPDQDRILTVRECARSQGFPDSYEFAGNIIHKHRQIGNAVPPPLASALGRKLKEAVDSKSST

SEQ ID NO: 30472 - protein, 216 aa, Glycine max
  Clone ID: TF_GmC1281_1.pep
MAKPKAPRRTLESYSVKHISKTIRAGDCILMRPSDLSKPSYVARIERIEADARGANVKIHVRWYYRPEESIGGRRQFHGSKEVFLSDHFDVQSADTIEAKCTVHSFKSYTKLDAVGNDDFFCRFEYNSSTGAFNPDRVAVYCKCEMPYNPDDLMVQCEGCTDWFHPACIDMTVEEAKRLDHFFCESCSAEGQKKLQNSHSASRHSDTKVDTKRRRR

SEQ ID NO: 30473 - protein, 189 aa, Glycine max
  Clone ID: TF_GmC1007_1.pep
MAEPMAVDSNPESGLDFESPFAWGKKRGMGGKKKDVQFYESFSFDGAEYAINDTVCLQSGIGGGEPHIGRLIKIWETRDKSRKVKVQWFFRPAEICKYLVGIEVKPNELFLACGGDGAKGFANVNPLEAIVGKCNVVCISKDVGNPQPSGEAKADYVYYRFFDVVQLKVVDQIDVKVAAGIEVKNVSNK

SEQ ID NO: 30474 - protein, 522 aa, Glycine max
  unsure (1)..(522): unsure at all Xaa locations
  Clone ID: TF_GmC1073_1.pep
MVNRRRLTRVATSDDEDEAPPRPQRTRKRMRLIEEDNDDDENEEEKQEEVPELPQPAEDAKPLGEPVRVSGKGRGRKRHYDSFEFDGIQYILEDPVLLVPEEKGQKPYVAIIKDITQSINGNVKVTGQWFYRPEEAEKKGGGNWQSCDTRELFYSFHRDDVPAEAVMHKCVVHFVPXHKQLPKRKDHPGFIVQKVYDTVERKLWRLTDKDYEDIKQQEIDELVQKTLKRMGELLDIEPEEPVADQEDLMKNKRILRKKSISPLDVSKEEETTRKGDQPLKPETPWSCINNASEHYRILVDFNALTGDTHRDKWLERLLQRIQFMFNSDDSKKRDKGLGNANSDEINNESKHRSSESATDCQDKVQKSSKSFNWPDVAVSAMVALEKASHDALSSDSMKYNQKLRQLAFNFQKNAVLARRLLSGELEPSKILNMTPNELKEGLVAEEKTKEPDETQHLQMTDARCSKCMDCKVGLREIIQAGNNERYQLECVSCGHSWYASRDEVSMPTIDASDPKGNIGTAP

SEQ ID NO: 30475 - protein, 102 aa, Glycine max
  unsure (1)..(102): unsure at all Xaa locations
  Clone ID: TF_GmC45167_1.pep
MVEAGEEEVIEFKWGTRKGLGGKKKDVQFYESFTYDGVEYSLFDSVFLYKEGEPEHYIGKILKIWENSDKSKKVKILWYFRPSEILNFLEGSETXENELFLA

SEQ ID NO: 30476 - protein, 202 aa, Glycine max
  Clone ID: TF_GmC189543_1.pep
MPSKRKTRSSASPAAAPPSKRASRSSASRVADSAPVKSEAEEVVAASSVVKEEAQASFTDVTDGNVSDGEGTNARFVGEPVPDEEARRRWPKRYQEKEKKQSAGPKSNRNDEDEEIQQARRHYTQAEVDGCMLYKLYDDAHVKAEEGEDNYICKIVEIFEAIDGALYFTAQWYYRAKDTVIKKLAYLIEPKRVFFSEVQDDN

SEQ ID NO: 30477 - protein, 216 aa, Glycine max
  Clone ID: TF_701150581_FLI.pep
MAKTRPGRKDVDSYTIRGTNKIVRAGDCVLMRPSDTSKPPYVARVEMIEQDNRNNVKVRVGWYYRPEESIGGRRQFHGAKELFLSDHYDVQSAHTIEGKCVVHSFKNYTKLENVGAEDYYCRFEYKAASGAFTPDRVAVYCKCEMPYNPDDLMVQCEGCKDWYHPACMGMTIEEAKKLDHFVCSECSSDDDMKKPQATFSASPGADGKVEPKRRKR

SEQ ID NO: 30478 - protein, 269 aa, Glycine max
  unsure (1)..(269): unsure at all Xaa locations
  Clone ID: TF_LIB4164-054-R1-K1-A4.pep
TRPGKGRGRKKHYESFEYDGNQYTLEDPILLTPEDKDQKPYVAIIKRMAVEQLELHXRYFGSGSPPFFLCRVWDITQSLNGSMMVTGQWFYRPEEAERKGGGSWQSCDTRELFYSFHRDDVPAESVMHKCVVHFVPIHKQLPNRKQHPGFIVQKVYDTVERKLWKLTDKDYEDNKQQEIDELVQKTLQRLGKLLDIEPEEPVADQEDLMKNKRILRKKSISPLDVSKEEETTRQGDQPLKPEXPWSCVNNASEHYRILVDFNALTGDTH

SEQ ID NO: 30479 - protein, 355 aa, Glycine max
  Clone ID: TF_GmC6253_2.pep
MGTTSCEKKSVVYVSWDEVFVSNDKGRREVHYLLKRRGGGSDLAVLGKEKSLLRHMSYRYAIRNAALFKPYLKLRSRREVVDWLDSIVSGRDFRWLDLKLNDSSSGDAVMVGKHGYEPEIGALKDNQLQKMHSCTKEFSWIGLPWTCKKRRKHYQAYKRNGFQISVHDFVFVLAEEDKRLVAYLEDLYEDSKGNKMVVVRWFHKIDEVGIALPHSFSDREVFFSLYLQDLSIECIDGLAFVLSPGHYEKFQNEARCTHLEPFICNHQFDNDDVKPFDITQIKGYWKQEILRYMYTQLDSKSSGSSRQSDDDLELDENHMTTVFIRPKKRLRLTKADDAKEAVDLVGLKTENVNNS

SEQ ID NO: 30480 - protein, 89 aa, Glycine max
  Clone ID: TF_LIB3242-256-Q1-J1-H5.pep
KTSYVTRIEWIEADARNTDVKIDVRWYYRPEESIGGHRQFHGSKEVFLSYHFDVQSADTVKARCTVHSFKSYTKLNAIRNDDFFYRFEY

SEQ ID NO: 30481 - protein, 138 aa, Glycine max
  unsure (1)..(138): unsure at all Xaa locations
  Clone ID: TF_uC-gmroLIB3258P128h04b1.pep
MVLQKRLEYGFNGYQTPAMLXASRSTRRRAKFQRAEDKQKCAFELLATVAGKLLQERENPTMSSDTSSEKDQSGFVKECQDANKPSKSVISDEGSCDKSGFSRLSSQTNNKNCGLKKIPHLAIDGDAGTASIVTSSTC

SEQ ID NO: 30482 - protein, 304 aa, Glycine max
  unsure (1)..(304): unsure at all Xaa locations
  Clone ID: TF_GmC34052_1.pep
YHFVIHFRYIEELSENESREHNPRXVNSNKTMGLGHVSPTSNVRPARNAFSEARTYGTRLDSLGGSDVQIPCVSRVRRSRPRKDIASLMKFHPTGMGEAEKLSNKLLEHSSDAGSDFSDKVLKSRMPAKFHQPSSSEPVKEQCPVICPIELRQELRPKRADPSSHTSDDNNIVTVPTAKGGMRRKHHRAWTLVEVIKLVEGVSRCGAGRWSEIKRLSFASYSYRTSVDLKDKWRNLLKASFALTPAPADEGINLRKHGTAPIPEKILLRVRELAEMNSQVPPNYSSSQLASGGGSVHGDRSGYL

SEQ ID NO: 30483 - protein, 251 aa, Glycine max
  Clone ID: TF_GmC3657_7.pep
WKTAPKLKDCELSDLGVPRYHKRKTCYGFERSQHNAIVKKRKFVDRVSGVTSDGGFSSESVSNSPQKGMDGDKPSSSAKLHVPKAKDSHVKFSIKSIRIPELYIEVPETSTVGSLKRTIVEAVMAILGGGAHVGVLLQGKKVRDDNRTLVQTGISCNENLDTLSFMLEPTSLQASPTVCVGDPSSQCETSQPTRSTEIPVLDSGITDTLHDSPLLTYPGNLIESNHESTSSLADTTLDKLTPDSRAIVVVP

SEQ ID NO: 30484 - protein, 131 aa, Glycine max
  Clone ID: TF_GmC3657_3.pep
IRLEVSQKTKRSEFVQRRTRRPFSVTEVEALVHAVEELGTGRWRDVKLRAFENADHRTYVDLKDKWKTLVHTATISPQQRRGEPVPQELLDRVLAAHAFWSQHQAKQHGKHQAGPGTLKITEASAERPCVC

SEQ ID NO: 30485 - protein, 147 aa, Glycine max
  unsure (1)..(147): unsure at all Xaa locations
  Clone ID: TF_GmC354_8.pep
MVLQKRLEYGFNGYQTPAMLXASRSTRRRAKFQRAEDKQKCAFELLATVAGKLLQERENPTMSSDTSSEKDQSGFVKECQDANKHCKSVISDEGRCDTGSSVVYQSNEPSALWFDIIQDVAIDGALKTMLLNASRRNRFKPRRGNCL

SEQ ID NO: 30486 - protein, 487 aa, Glycine max
  Clone ID: TF_GmC354_4.pep
MCSFEDPLDENPPALISLGGNAKLSGYNDRIPCSLLSKSRDNVPVVSRDDDENSYGCTHPINTKTKSFRLKTGIGDNRISKRLASNFQKVAEKTKDHTHSNNDGDWKRTYCSKRNCNKHQSSQMNIPFKKRKLFNYRSVSNSNGLIRSGGIYYSPENCMNQDGCGSPPGMHKDPGMPSLEACQHQTLRSRGSHVNLRIKSFRVPELFIEVPETATIGSLKRTVMDAVTAVLGGELHIGVFLQGKKVKDDSKTLLQTGISHQNELDALGFTLEPNSSQSLPIVCAAHSPGPKADITQPVIRYPSSPAVIHQRIQGNSDMLPEHQVTSLGSHFENDHDSAPSPVNASVEKGMKDSKELVTVPEMDEELAMVPVHQKSKRSEIVQRRIRRPFSVDEVEALVQAVEKLGTGRWRDVKVCAFDNAKHRTYVDLKDKWKTLVHTARISPQQRRGEPVPQELLDRVLVAHAYWSHQQTKPQHKHHPETETVFSF

SEQ ID NO: 30487 - protein, 563 aa, Glycine max
  unsure (1)..(563): unsure at all Xaa locations
  Clone ID: TF_GmC3657_1.pep
MVLKKRVDHGFDGLRVPVIPKAPRSARRRIAFKKAVEDGQVCAIELLASLAGQLLQESEGSASSNASEGNHHPPFSQGVIEQDIQDGVKPLKKEEIHQGSCVESTFKTEVASQNSSFKPLSHTKTGHVSVNNSSDCCEKAEADVKSEIFEWDNKFGNYSNRLVETREKFRVSTHGNIKNGFKWEQEAGSSCIRGSNLADKCSLEDHLELYVSPALIDSKSNIKSPFHRKFFPSASFSRYGNGIKLGFRDDDENFLRCKKFCTKPKAFRSPRRIAHRRIRNLMSSKYWKTAPKLKDSELSRSDLGVPRYHKRKTCYGFERSQHNAIVKKRKFVDRVSGVTSDGGFSSESVSNSPQKGMDGDKPSSSAKLHVPKAADSHVKFSIKSIRIPELYIEVPETSTFSLKRTIVEAVMAILGGGAHVGVLLQGKKVRDDNRTLVQTGISCNENLDTLSFMLEPTSLQASPTVCVGDPSSQCETSQPTRSTEIPVLDSGITDTLHDSPLLTYPGNLIESNHEPTSSLADTTLDKLTPDSRAXVVVPATTETLAVVPGKSALSLAFVNDLTQ

SEQ ID NO: 30488 - protein, 106 aa, Glycine max
  Clone ID: TF_jC-gmro02910008g09a1.pep
TVKFSIKSIRIPELYIEVPETSTVGSLKRTIVEAVMAILGGGAHVGVLLQGKKVRDDNRTLVQTGISCNENLDTLSFMLEPTSLQASPTVCVGDPSSQCETSQPTR

SEQ ID NO: 30489 - protein, 205 aa, Glycine max
  Clone ID: TF_GmC354_1.pep
MQGGMRSFLSHGNVIRNAVLQRVRMVNPLLQTIASSRFESVTPARIEEHGFESTTISDILNDKGKGADGSWLWCTTDDTVYDAVKSMTQNNVGALVVVKSDANKAIAGIITERDYLRKIIVQGRSSKSTKVGDIMTEENKLITVTPDTKVLQAMQLMTDKRIRHIPVIDEKGMFGMVSIGDVVRAVVREHRQEVERLNAFIQGGY

SEQ ID NO: 30490 - protein, 67 aa, Glycine max
  Clone ID: TF_GmC144846_1.pep
VGIRRTLQPMLRPLSSGLKIKPTNTPLSSCVELCLHQKNEHLFLVVCKKFVDERQSKNSHPETWAIV

SEQ ID NO: 30491 - protein, 684 aa, Glycine max
  Clone ID: TF_GmC354_6.pep
MVLQKRLEYGFNGYQAPAMPRASRSTRRRAKFRRAEDNQKCAFDLLATVAGKLLQERENPTMSSDTSLEKDQCGFVKECQDANKPSKSEISDEGSCDNSGFSRLSSQTNKKNCGLKEFTHLAIDGDVGIASIVTSSSCLERFIAEKMVDSNSHFKVENVTSKVNLDFSDYPKDSDFKLDGDTSKGKDELHKFEKVPIGSGIDMCNFEDPLDVNPPALISLGGNAKLSGYNDRIPCSLLSKSRDNVPVVSRDDDENSSGCTHPINTETKSFRPKTCIGKRMASNFQKVAEKTKNYALSNNDGDWKRTYLSKRNCNKHQSSQMNIPFKKRKLFNYRSVANSNGLIRRGGIYYSPENCMNQDGCDSPPGMHKDPGMSSLEACQHQTLRSIGSHVNLRIKSFRVPELFIEVPETATIGSLKRTVMDAVTAVLGGELHIGVFLQGKQVKDDSKTLLQTGISHHNELDALGFTLEPNSSQSLPIVCASHSPRPKADITEPVIRYPSSPAVIHQRIQGNSDMLPEHQVTSLGRHFESDHDSAPSPVNASVDKNMKDSKELVTVPEMDEELAMVPVHQKPKRSEIVQRRIRRPFSVDEVEALVQAVEKLGTGRWRDVKLCAFDNAKHRTYVDLKDKWKTLVHTARISPQQRRGEPVPQELLDRVLVAHAYWSQQQTKSQHKHHPETETVFSF

SEQ ID NO: 30492 - protein, 156 aa, Glycine max
  Clone ID: TF_GmC347_1.pep
MIKIESCAKGDLNIVSSLEDTSTNNNMSKCRALVAVPAINMEALAVVPFWRKSGNPDFAQRRIRRPFSVLEVEALVQAVEKLGTGRWRDVKQRAFDHAKHRTYVDLKDKWKTLVHTARISPQQRRGEPVPQELLDRVLAAHAYWSQHQCKHQLKPL

SEQ ID NO: 30493 - protein, 90 aa, Glycine max
  Clone ID: TF_GmC3657_8.pep
MVLKKRVDYGFNGFRVPVIPKAPRSARRRVAFNKAVEDGQVCAIELLASLAGQLLQESESSAFSNASEGNHQPAFSQGVIEQDIQDEVKP

SEQ ID NO: 30494 - protein, 46 aa, Glycine max
  unsure (1)..(46): unsure at all Xaa locations
  Clone ID: TF_8670002.pep
QDKWKTLLHTATLSSDQLMGXPLPQELLNMVLAAHAFWSYHQSNHH

SEQ ID NO: 30495 - protein, 370 aa, Glycine max
  Clone ID: TF_GmC57466_1.pep
VLWVDVFLICSNAMQYNSSDTIYHRQARAMQEIARKDFENLRQDSDDDSEPQPKIVQKGRPPGKHSRKSLGLGMPPSERVGPESSSDATLASGADIGSGSNGYKFRKVPSKFQPTDSSARAYNSTFNSGGYTGCSDWENEFPASVVKAVLRYGKKQFAVDETRRDTYKNPVTLGNERPMLSTVEDEFKQLLAVGVHMKHSYARSLAHFAANLGPVVWKIAASKIRGVLPAGHEFGPGWVSEDDGSSQRRHFPVCDEGRTSDPPVPEDYRSRFSSPSGSLPLANRPFYQSGDMAIDNYQNELNPVINIPGGSESITPMRIQQESMVHSDDFGSHDRLGSNFPSQMKMVRLADLTGTSSAGVVPQMFDMDPP

SEQ ID NO: 30496 - protein, 121 aa, Glycine max
  Clone ID: TF_GmC373325_1.pep
MDRCKKMQCWAMLKRLMVGRDAWALKKDILDPKVLCVLHKSEAIRKPKGLEDIESKLKNWDYSETDEFVDDVKLVLSYALQYPQRSEVHRTARRISEGFEISWKTMKAKWMRDEQDLQEKR

SEQ ID NO: 30497 - protein, 463 aa, Glycine max
  Clone ID: TF_GmC14843_1.pep
MGPNLVTEVPEGEDDRKFSSPQLLHSYSDKRSYDHFHKRDKSYKGKVNQDGFESFDCDMGEHTSVFSNQHGLGIGLSDVTSDPMRQTRFIRMKTTSEEPSTSNRRIKIRQGQSSRGKSDREDSSTRMSDQLHRRIRTARHRNGEYIANDSGTLTRRVSNHHVKKLSWLMLSEPEEGYRYIPQLGDEVVYLRQGHQEYIKSYSLSESGPWRSFTGLGASEICKVEELEYAELPGSGDSCCKLKLRFLDPSSCVHGKSFKLTLPELINFTDFVIEKTWYDTAMKRNWSSRDKCMVWWRNEDGKGGSWWDGRIIQVQAKSDDFPESPWERYRVQYKTDPTENHLHSPWELYDSEMLWEHPHIDHEIRDKLLSYFTKLDRRERFDIQALNQVAEKLEFANRFPAPFYPELIQSRLKNDYYRSVEGVNHDIMIMLSNAEEYFKITKNVQLVGKIRRISEWFRRKLERI

SEQ ID NO: 30498 - protein, 346 aa, Glycine max
  Clone ID: TF_GmC303_6.pep
RDLDRVEPSKLSQIPCKLIEKDMHKGNKGNHDVEQPAGSLKACSSVCFVTSKCRICGDTTCHCVIPSNSIQVSSDISSEGSEGGDVITRGADSLRQNCPTKCTSPIEKKSDPDSDGAVSSLDSEHVCPSSQHVTPTTDASSGEVWSTPVLPVQLSPKKALRAAMLKSRFADTILKAQQKTLLDHGDKGNPQKMQQEKERLERIQREERARIEAQIKIAEAAARMRAEEESRQRREKEREAARAAIEKMKRTVDIEHFLEIIKELESLSGCTLSYKAVGCRNGYKVALETLDKPQFENPLERLGLFIKEDFTADEDEEVLNGGFEEGEIFNCMKVYSVLPALTVYIL

SEQ ID NO: 30499 - protein, 531 aa, Glycine max
  Clone ID: TF_GmC11917_1.pep
MASAYRNEPNWPRHRSGGAGFMGKVPFSNPNPNPNSNPKLANGKKTQSASDDASSINRRSNDAATHSQYVTFNVASCTKKELNDFKNRLVSELEQIQKLRNQIGSSEFQPGQSLNGHPKKPLGKKISGNKRPLPSNSAKDLKRSHSEVGNLMKCCSQVLQKLIKHKHGWVFNAPVDVVGLKLTDYCDVIKQPMDLGTVKSNLSMNVYATPSDFASDVRLTFNNALAYNPKGHDVYTVAEQLLARFEELYRPVHEKFEGSIGHDRESEEELQASSWSQVEPERVKKKENPIPPAKLHKEPPPQHPASSSNPPLVQSPVRTPSPMRAPPVKPLKQPKPKAKDPNKRDMSLEEKHKLGLGLQSLPPEKMEQVVQIIRRRNGHLKQDGDEIELDIEAVDTETLWELDRLVTNYKKMVSKIKRQALMGNIDNNNNDVQSNKGNGELPSSEKVDGGPVEVKKPKKVEAGDEDIDIGDEMPTSMFPPVEIEKDKDVVGGHASSSSSSSGSSSSDSSSSSDSDSGSSSGSDSEADNGHS

SEQ ID NO: 30500 - protein, 273 aa, Glycine max
  Clone ID: TF_GmC801229_1.pep
MGKSRKYSKGHATGFVPDFRHAVETMGESEGLGNLGRVDNELTMSEISCAPKRKRVDESFDVPFQLLSLTKMARSGRKDLTLRLKSELEEVRKLQKKIAGMSSITTELSPYSDIRSCSVGEKRPPLESLALHGKKRPLLKHNGPKTKRSISGRFISAKSAAPVTPSYAVLMKQCETLLKRVMSHQFGKVFDKPVDIVKWNIPDYFTIIKHPMDLGTVKSKLISCEYTSLMDFAADVRLTFSNAMSYNPPGNDVHVMAETLSKYFETRWKAIEK

SEQ ID NO: 30501 - protein, 728 aa, Glycine max
  Clone ID: TF_GmC4550_1.pep
LPPRGHPSCVSAEAFAGRAPVRSSKQEQIHNSIVSTLLALMDGLDSRGQVVLIGATNRIDAIDGALRRPGRFDREFNFPLPGCEARGEILDIHTRKWKHPPPNELKKELAASCVGYCGADLKALCTEAAIRAFRQKYPQVYTSDDKFVIDVDSVKVEKTHFIEAMSTITPAAHRGAIVYSRPLSLVVQPCLQRHLEKAMCSISDIFPPASITSELTKLSMLSYGSAIPLVYRPRLLLCGGEGTGLDHLGPAVLHELEKFPVHSLGLPSLLSDPSAKTPEEALVHIFGESRRTTPSILYLPQFDVWWETAHEQLRAVLLTLLEELPSDLPILLLGTSSVALSEVEEVPTSIFPHRSVYEVNMPCAKDRTLFFNLLIEAAMSILLEGINKKSQDTGCLPELPKAPKLASGPKVSELKAKVEAEQHALRRLRMCLRDVCNRILYDKRFNAFHYPVTDEDAPNYRSIIQNPMDMATILQHVDNGDYITSAAFLQDINLIVSNAKAYNGEDYNGARIVSRACELRDAVHGMLSQMDPALVAYCEKIASQGGPVQLSDELGDSTFPATPVVQLGQSTRMSARLRHVQPEVNMNQSYEVLKRTKKIAEVHAEDKSQEDSVPPKSSQEHQANDTNSERLENVSIEGDLHGTFTNNLADGNSPDDVTMLDGEFSGEVESVKQLFVKRSENYSIPQLERLYTRVMKGVFETKNKGVNGDLKSSVLKFLLNFVEDDANF

SEQ ID NO: 30502 - protein, 264 aa, Glycine max
  unsure (1)..(264): unsure at all Xaa locations
  Clone ID: TF_GmC5690_1.pep
MRKRKSEPLVGVLELIKGHEHSSLFERRLDSQGDTDRYKDLVKQPMDLETIQLRPQKGHYSSCTSAFFRDLLLLFTNATVFFSHDSLESQAGRQLHRLATAEMKNHGQAQSDPIPRKNDSLPTNAPXAKPDSLLYKNKASGPILGWRKRSSMRRKPSSATFGQKGDQPVFNDKKERPSSDAKPPMKPSSSDTDEEELPKAKEKPVTGARSLRRSNKNLNSNSSNNNNKKPSSISTPKAGSSGNKPSETVKPEKRTFQEMISKAS

SEQ ID NO: 30503 - protein, 311 aa, Glycine max
  Clone ID: TF_GmC12104_8.pep
QFESDVFLICSNAMQYNAPETIYHKQARSIQELGRKKFEKLRIGFEHSQIELKSEQKAGSNYLVKKQPKKPLARASQEPVGSDFSSGATLATIADVQPTSHLMQGGRCERSGNLDGILEANAFWIDANQEKAEDVLLGKGLLSKWGRKSFALDESRRASYNMSNQPIVKPDSIFMTFERGMKHLVTVGLHAEYSYARSLARFSASLGPIAWKIASHRIQHALPAGCKFGRGWVGEYEPLSTPILMVNNRVQKENSLVMKLHSTTELPKGNQNCKNVESSIMHPVNGQMLEGKRPSMPDFKGKPLFQSHKQP

SEQ ID NO: 30504 - protein, 268 aa, Glycine max
  Clone ID: TF_GmC303_4.pep
MIATETIVPSTKLKIKFSTKRIEIDSGPKCEFGQKVYHNDKNRRCNSNENSSALNSNKRGPPVSVEGQKEKRQKIDRKGSMQCATILKSLMSHSYSWVFLKPVDPVALSIPDYFTIISHPMDLGTIKSKLEKNIYSGTEEFAADVRLTFSNAMKYNPPSNDVHLMAKELSKIFDRKWKDLGRKWKCEDEHDKSESETIKETGRKSLDMLSRHRDSLPKKTQVSEHKGMPKIRSLATKLQACSYLIPRQEVIKADIVKRLDSKQYVHLQ

SEQ ID NO: 30505 - protein, 128 aa, Glycine max
  unsure (1)..(128): unsure at all Xaa locations
  Clone ID: TF_GmC1259_1.pep
ENVLNRLMSHQFGWVFNTPVDVVKLNIPDYFTVIKHPMDLGTVKKRITSGEYSNPMDFAADVRLTFENAMFYNPAGNDVHXMAETLSKFFETRWKAIEKKIPAIDSVASEPSRPTHVETEISDRVPPP

SEQ ID NO: 30506 - protein, 148 aa, Glycine max
  Clone ID: TF_GmC12104_17.pep
FGSSARRRQKGDTYGVFADPVDPEELPDYHDVIEHPMDFATVRKKLGNGSYTTLEQFETDVFLICSNAMQYNAPETIYHKQARSIQELGRKKFEKLRIGFERSQNELKSEQKAGSNYLVKKQPKKPLARASQEPRLTDLVLVFFLATI

SEQ ID NO: 30507 - protein, 610 aa, Glycine max
  unsure (1)..(610): unsure at all Xaa locations
  Clone ID: TF_GmC533_1.pep
MSSSAPRNKAKPGNKNQKPRGWNRGSSGKFESAVQSASPSTANAMLMKDCELLLKRXEANEYAWVFNTPVDVVKLNLPDYFTIIKRPMDLGTVKSKLAAGEYAGPLEFADDVKLTFSNAMNYNPSGNDVHLMADTLNKYFELRWKAIEKKLPKSDVLPIPAKPDNSEGVKTKRQAPPSKKRKIASLPPQPKVMPPTKKVMSDQEKHDLGRELESLLGEMPMHIIDFLKEHSSNGRECGDDEIEIDIDDLSDDTLFTLRKLLDDFLQEKQKNKAKVEACEVEVLNDSGPSNSSLQPFKGNDPADEEVDIGGNEPPVSSYSHVEIEKDTTYRVNKSLSPGSSNDTDSDSSSDSEADDVKASPANVAKAPENLGSEAQLDEMTMAAATLERNQSVSGLDQLEDNSQHKPSSFDSDCQQDGDSAPTERQVSPDKLYRAAVLKKRFLDTILKAREKTLTQGEKGDPEKLRQEREKLEMEQKKEKARLQAEAKAAEDARKRAEEEAAAEARRKRELEREAARQALLQMEKTVEINENSRILEDLELLRAVPTEQLPSSVDETSPAHSQDGLGSFKFGSSNPLEQLGLYIKADDEEEEGEPPCIPNPVNDVEEGEID

SEQ ID NO: 30508 - protein, 149 aa, Glycine max
  Clone ID: TF_GmC7409_1.pep
KRRSVTELEKIGADYMPPTKRQRGGGGEVGLANILESVVDTIVKDRYDLSYLFLKPVSKKEAPDYLDVIERPMDLSRIRERVRNMEYKSREDFRHDMWQITFNAHKYNDGRNPGIPPLADMLLEYCDYLLNENDDSLTEAEAGIEIRDF

SEQ ID NO: 30509 - protein, 86 aa, Glycine max
  Clone ID: TF_jC-gmXLIB3563P012bc09d2.pep
CQRQRLVKCVTLISLDLYYRFPAPFYPELIQSRLKNDYYRSVEGVNHDIMIMLSNAEEYFKITKNVQLVGKIRRISEWFRRKLERI

SEQ ID NO: 30510 - protein, 157 aa, Glycine max
  Clone ID: TF_GmC343932_1.pep
KKRRGKRKRKDCGRNMKEASVGESDLLDSADIVSWCKESSTSNCGEVAKSCGVDDQNRNLKKDRVEDMMEILDFIFETKGAPAFRRRLDSQKRGRYKKMIRQHMDFDTIRSRISSQTIKSSVELFRDLLLLTNNALVFYSKSTREYKTVLLLRGIVT

SEQ ID NO: 30511 - protein, 132 aa, Glycine max
  Clone ID: TF_uC-gmroLIB3258057e03a1.pep
FAADVRLTFSNAMKYNPPSNDVHLMAKELSKIFDRKWKDLGRKWKCEDEHDKSESETIKETGRKSLDMLSRHRDSLPKKQVSEHKRMPKIRSLATKDARVSVVVCEGEKSYCNTKEYNIITGIDEIKLVSTY

SEQ ID NO: 30512 - protein, 541 aa, Glycine max
  unsure (1)..(541): unsure at all Xaa locations
  Clone ID: TF_GmC4529_1.pep
MKRKRGHKKGKAKGSTNHGSSGADANKEETSGLEVDTPSSTGTGMDQQQHYNLANINPDGSVDKAIGRVKVKLKTPKILDSQPTSFDAPSPTQSDTERMEDSANSLPDMKLSTLFKRAASIKIKSSSNHTLSASTEITLPKERKNKQELDASLVVLRKVMKMDAAEPFNVPVNPEALGIPDYFDIINTPMDFGTICNNLEKNEKYMNSEDVFKDVQYVWDNCYKYNNKGDYILDLMRRVKKNFMKYWTAAGLYSEQSKGTKERTSAEDIALSGDGKAGKGGQLKQKTKKRHGRHHKHDCLCAICVLKRRRKEREENARIARSNFGSGGDKHANEFKHEESIQVESPGGEDSSSNIDESMGTDGDVDEDKGEVAKMEIAEKEXSPSERKHVSIDVDNDDDNDDHGLEEGEEEENGEEEDEEEIEMNSQKGEMNETLKHGGTLEEKSNVGDATALHDEYRTKQQEGQSAAVQQQKKHKGSQDKQQKAKLLESLYSENHKLSSLCGILFPQNSQSVWSGPHSLIQKRNSARTSSIHAAIRTFMG

SEQ ID NO: 30513 - protein, 343 aa, Glycine max
  unsure (1)..(343): unsure at all Xaa locations
  Clone ID: TF_GmC629_1.pep
MDADPPQLDDHLEPFRVSVNQILTTVNKLEKQVTEVEQFYESTDNVQGNNSKGGSLAKEKGREKHITGTKKPLQDASHTEASSAKRMQELMRQFSTILRQITQHKWAWPFMDPVDVEGLGLHDYYEIIDKPMDFGTIKSKMEAKDGTGYNNVREIYADVRLIFKGKMAATFTXNDVHVMAKTLLEKFEEKWLQLLPKVAEEEKRQLEEEAQAQLDIQLALETTYANKAKDISTELCEIDMHLKSLKEMVIQQCRALDIIAETNPMFQPSSTEDVVLDLDAQSDYTLWRLKAFVKDSLEEQVKVNAGAGINPNDNPDDKKNKKRRDSGDSSGKTNPKRKKLSTL

SEQ ID NO: 30514 - protein, 432 aa, Glycine max
  Clone ID: TF_GmC1758_1.pep
MLPGSYTPLLSVQSKQQHSFILITSLPIAHSSSLHSTFLSPLASFYQWPAGLCCVSFITSFNISPLACFPMAAAVSAAVSFPSTKSTSLPSRTSLIAPERVVFKKASLQNRDVSSSGRVVSIRAQVTTEAPAKVEKESKKQDEGVVVNKFKPKTPYIGRCLLNTKITGDDAPGETWHMVFSTEGEIPYREGQSIGVIPDGIDKNGKPHKLRLYSIASSAIGDFGDSKTVSLCVKRLVYTNENGEIVKGVCSNFLCDLKPGAEVTITGPVGKEMLMPKDPNATIIMLGTGTGIAPFRSFLWKMFFEKHEDYKFNGLAWLFLGVPTSSSLLYKEEFEKMQEKSPDNFRLDFAVSREQTNEKGEKMYIQTRMAQYAEELWELLKKDNTFVYMCGLKGMEKGIDDIMVSLAAKDGIDWTEYKRQLKKAEQWNVEVY

SEQ ID NO: 30515 - protein, 107 aa, Glycine max
  Clone ID: TF_LIB3138-023-Q1-N1-B1.pep
IKSKLERNIYSGTEEFADDVRLTFSNAMKYNPPGNDVHMMAKELSKIFDRKWKDFGRKWKFEDEHDKSETETIKETGRKSLDAMLPRHKDSLPKKNTIIRTQRNAQD

SEQ ID NO: 30516 - protein, 292 aa, Glycine max
  Clone ID: TF_GmC105619_1.pep
GGITYRPYASQRFGEIAFCAITADEQVKGYGTRLMNHLKQFARDMDGLTHFLTYADNNAVGYFIKQGFTKEIHLEKDRWQGYIKDYDGGILMECKIDPKLPYTDLSTMIRRQRQAIDEKIRELSNCHIVYAGIDFQKKEAGIPKKIIDDIPGLREAGWTPDQWGHSRFRTLNVSSDNATNQKHLNGFMRSLLKSMFDHADAWPFKEPVDARDVPDYYDIIKDPMDLKTMSKRVDSEQYYVTFEMFVADARRMFANARTYNSPETIYYKCSTRLEAHFQSKVQAGLQPGTKIQ

SEQ ID NO: 30517 - protein, 269 aa, Glycine max
  unsure (1)..(269): unsure at all Xaa locations
  Clone ID: TF_GmC399618_1.pep
LEISITGVPHDAVQVFIRFLYTSSCEKEEMDEFVLPLLVLSHVYVVPHLKRECEQKLELSLLTIDNVVDVFQLALLCDAPRLNLICHRKVLKNFKVVSETEGWKTMKLSHPALEKEIVESMVDEDIIKKEKIRKNKEREIYLQLYEAMEALXHICRDGCRTIGPHDKDSIANQPCKYTACNGLELLVRHFAGCKLIVRGGCVHCNRMWQLLELHSRLCVDPDYCRVPLCRNFKERISKQIKKDEIRWKILVQKILRTRGIGIASCFLPQ

SEQ ID NO: 30518 - protein, 173 aa, Glycine max
  unsure (1)..(173): unsure at all Xaa locations
  Clone ID: TF_GmC328_8.pep
LNFMYSNTLSITSPPALLDVLMAADKFEVASCMRYCSRLLRNIPMTPESALLYLELPSSVLMADAVQPLTDAAKQYLASRYKDITNFTYXRFQEEVMGLPLAGIEAILSSDELQVASEDAVYDFVLKWVRTQYPKLEERREVLGTRLARLIRFPYMTCRKLKKVLTCNDFDHD

SEQ ID NO: 30519 - protein, 262 aa, Glycine max
  unsure (1)..(262): unsure at all Xaa locations
  Clone ID: TF_GmC935_2.pep
MVRNRRKMLPRRCTASMGSSNGSESDASDLVMRCPSCEGEYDMDDSGPFRECFPEAHEAEEELRREIEELQXKVSFLNSPLSQTKSFNRRNHPRSRRRIPSRSNSRSQAPFWLSRSXPVFKAMLENXMAERRSGTIKISDVSYDTLHAFVNYLYTAEASLDNELACNLLVLGEKYQVKHLKTYCEKYLIAKMNWDKAISNYAFAYQYNCKQLQSVSLAVILDHMDSLTQNECYAELVDTNPRLVVEIYETYIGRLLNTAGAF

SEQ ID NO: 30520 - protein, 69 aa, Glycine max
  Clone ID: TF_LIB3056-012-Q1-N1-E9.pep
FSDISIYIEGQGLIARAHKVILGIYSVLLTKMFTNGMCESNSPEVCLKDVSSAALNAMLEFMYCMDLKY

SEQ ID NO: 30521 - protein, 346 aa, Glycine max
  Clone ID: TF_GmC523_9.pep
MAPQTISILNLLPEPDVFIHTSHGTRIPAHAPILASMSPVLENLIDRPRKHRSSERIIQIHGVPCDAVTAFVRFLYSSRCTEEEIDQYGMHLLALSHVYMVQQLKQRCIKGLTHRLTTESVVDVLQLARLCDAPDLHLRCMKLLAKNFKAVEATEGWKFLVKHDPWLELDILRFIDEHETRKKKSRRYRMEQGIYAELSEAMECLEHICYEGCTHVGPYDAEVKRERTPCGRFATCQGLQVLIRHFATCEKKVRGGCVRCKRMWQLFRLHSYVCHDTDSSCKVPFCRQFQLRMQQEKRKDDAKWKLLARKVASAKVMSSLSLPKRKRDEETRVTMDNPGIRSFKLL

SEQ ID NO: 30522 - protein, 351 aa, Glycine max
  Clone ID: TF_GmC523_10.pep
MAPQTISIHYHTTRFLPQPDVFIRTSHGTRIPAHAGILASMSPVFDNFIDRPRKHRSSERIIQIHGVPCDAVTAFVGFLYSSRCTEEEMDKYGMHLLALSHVYMVPQLKQRCIKGLTHRLTTENVVDVLQLARLCDAPDLHLRCMKLLANNFKAVEATEGWKFLVKHDPWLELDILRFIDEHETRKKKSRKYRMEQGLYAELSEAMECLEHICYDGCTHVGPYDAAEVKRERTPCGRFATCQALQVLIRHFATCEKKVRGGCVRCKRMWQLFRLHSYVCHHTDSSCKVPFCRQFQLRMQQEKRKDDAKWKLLARKVASAKVMSSLSLPKRKRDEETRVNINNPGIRSFKLL

SEQ ID NO: 30523 - protein, 184 aa, Glycine max
  Clone ID: TF_9258031.pep
MKKGFQFAGYDKATIGTITLDCQSPYGEKRNRCALLPPNVPILAHSLERTQRNWIARSNSPTDIIIQVGDSSFHLHKLAIASRSEYLNRLVFQRGSNREKAGDSLIIQMKNLPGGKKTFELVVKFCYGRKIDITAANIVPLYCSAHFLEMSEDVEDGNLISKTESFLTFLILSSWKDTFRILRA

SEQ ID NO: 30524 - protein, 222 aa, Glycine max
  Clone ID: TF_GmC248068_1.pep
MRGWNQFETIYEEEQELSSTSSPFLSPSSSSSPPPPPSLHSIVNAWSLDSGSEPDVLICVQGTSFRLHKVRLISRSSYLKRHLTGVSDLTLSPPLNLTAETFAAVAEFCYSRRVHLTPSNVAAVRVAAELLGMTGEENLREVTESYFERVVGIGASMVLRSCVALLPEAETTASLASRCIEALVWEDDVSCMSDVVGMHPQDFQTGSYSLNRRVPNHDVLYK

SEQ ID NO: 30525 - protein, 100 aa, Glycine max
  unsure (1)..(100): unsure at all Xaa locations
  Clone ID: TF_GmC138527_1.pep
AVSNIRRNFSLALSLQFNTSRIEGTVGKEIFHHTPYSIKNLRFLYGGILKNIVIPNIKWGVFELMMRYVXTGTVNVNLDIAEDLWRAADQYLLDHLKRYF

SEQ ID NO: 30526 - protein, 327 aa, Glycine max
  Clone ID: TF_GmC6774_1.pep
MDSPAVSSIHFHNAHVLPEPDLFMHTPGGNRIPAHATILASASPVLENVIASNRVVKIHGVPDGAVTAFVAFLYSSRCTEEDMDKYGIHLLALSHVYSVPQLKQRCIKGLAQRLSTENVVDVLQLSRLCDAPDLYLKCVKLLRNRFKAVKETEGWKFLESHDPWLELDVLRLMGELEKRKRRVRKWREEERLYVQLSEAMECLEHICTEGCTEVGPYEVEVGRQKTPCSKFATCQGLQVLIRHLGTCNRLVKGGCLRCKRMWQLFRLHSSICLCQNSCKVPLCRQIRLKMEQENMKDDARWKLLVRKVASAKALSSLALPKRKLDQS

SEQ ID NO: 30527 - protein, 308 aa, Glycine max
  Clone ID: TF_GmC54082_1.pep
MATPNNRLSLAMERTGQWVFSQDIPTDVIVEVGETTFSLHKFMLVAKSNYIRKLILESDESELTRIDLSDIPGGPSIFEKTAKFCYGVNFEITVHNVAVLRCAAEFLQMTDQYCENNLAGRTEEFLTQVAFFTLTGAVTVLKSCRHLLPYADDINVVKRCVEAVSAKACSEANFPSRSPPNWWTEELALLDIDFFARVIDAMKQRSAKALTVAAALITYTERALRDLVRDHTGNGIRSSDPGDSDSRSKQRKLLEAIVDPFPSEKAAFPIHFLCCLLRCAIYLRAYAGCKTELEKRISAILEHVTVDN

SEQ ID NO: 30528 - protein, 419 aa, Glycine max
  unsure (1)..(419): unsure at all Xaa locations
  Clone ID: TF_GmC7983_24.pep
MLEKLNTYSRYTSSLESYGSFDKLQLVINLIGLTCLSSLPEYQSCIIESKGIKAIVLLVKRCLSNDIHVERRNFTPHLHTTFQERSCCCMDKEDWEGSNVLLFYSLLGLSEILRQCDLLQDNSQQYSREVTNIRAQLVSKLHEICSGNSFSPGVRWYVLYILTYFGFYGFPNELAKRIGKSLNKEEYSDMRLVVSSHVEYEALVLLLKYEYLGCLHAGEETVKKLKILAKRCKLQHLLQMLYRQRPKWGTPFPSFNLTPSLGSAGSCFSDAILEAKSNKLVGWTCNICSDTVPHMHVHKVILQSGCDYLQGLFRSGMRESHSQVIKVDISWEALIKLVQWFYSDELPNPPSGCMWDNMDDEEKLFNLHHMWSFVXLAEFWILENIQEACWNVIMSCLDNEQFFIQIHTINSGCYYRLEN

SEQ ID NO: 30529 - protein, 264 aa, Glycine max
  Clone ID: TF_GmC68877_1.pep
STTAASDLSLKELGAYFISSAMKRASEWAYSHEIPSDVTIQVGEVSFSLHKFPLVSKSGYIGKLVSESSDAFIELYDVPGGAEAFELATKFCYGINFEISIENIAMLRCVAEYLDMTEDYSVGNLVGRADSYLNEVALKTISGAVSILHMSERFLPIAEKAKLVSRCIDAIAFIASKETQFCSPMRGDIIGTDGMASHQRPVVHWWAEDLTVLRIDIFQRVLIAMMARGFKQFALGPIIMLYAQKSLRGLVRLKPLTPKVLTYK

SEQ ID NO: 30530 - protein, 194 aa, Glycine max
  unsure (1)..(194): unsure at all Xaa locations
  Clone ID: TF_GmC253982_1.pep
RNSRVDPRVRGRVGDLIRICRXCRCESLHKVLEKELIHQKYADYKALGDVDNSQKRYILQGLSLPQEDRLPAALHRILLTALSNSTRQSGQEDEIDKLVTRMGAMQMAKSLDDLADVCVRVDRKIFRCHQVILASRSEYFKARLSHMKDFHEDIDELSVDILPCLEEHDLSMEAEKMIEYMYTGSFAGYKSRSG

SEQ ID NO: 30531 - protein, 395 aa, Glycine max
  Clone ID: TF_700895650_FLI.pep
KCVCLVVFILQLFSNGMRESEQRHVALRINASEEAALMELLNFMYSNTLSITSPPALLDVLMAADKFEVASCMRYCSRLLRNIPMTPESALLYLELPSTVLMADAVQPLTVAAKQYLASRYKDITKFQEEVMGLPLAGIEAILSSDELQVASEDAVYDFVLKWVRTQYPKLEERREVLGTRLARLIRFPYMTCRKLKKVLTCNDFDHDVASKLVLEALFFKAEAPHRQRILAAESASFNRLFVERAYKYRPVKVVEFELPRQQCVVYLDLKREECANLFPSGRVYSQAFHLGGQGFFLSAHCNMDQQSSFHCFGLFLGMQEKGSVSFAVDYEFAARSRPTEEFVSKYKGNYVFTGGKAVGYRNLFAIPWTTFMAEDSLYFINGALHLRAELTIRH

SEQ ID NO: 30532 - protein, 105 aa, Glycine max
  Clone ID: TF_GmC130929_1.pep
KNSTPPRGRNNNVSPAAIEFWERLFYHGYKADVCINTDNGGVVYAHSNILAMSTPVFRGMLKQANCHRRWRTISITGVPHDAVHSFIRFLYTSRYKKEEMDEFVL

SEQ ID NO: 30533 - protein, 413 aa, Glycine max
  unsure (1)..(413): unsure at all Xaa locations
  Clone ID: TF_GmC337_1.pep
MGKIFRENAKPSANSSSAYPSAAPATTSSTSVTETVRGSHQFKMTGYSLSKGIGIGKYMASDVFSVGGYNWAIYFYPDGKSVEDNATYVSLFIALASEGTDVRALXFELTLLDQSGKERXKVHSHFXRGTLESGAYTPLKYRGSMWGYKRFFKRTALETSDYLKDDCLSVNCSVGVVRSHTEGPKIYTIAIPPSSIGQKFGQLLESGKGSDVNFEVNGDIFAAHKLVLAARSPVFRAQLFGPMKDQNTQRIKVEDMEAPVFKALLHFIYWDSLPDMQELTGLNSKWASTLMAQHLLAAADRYGLERLRLMCEASLCEDVAINTVATTLALAEQHHCFQLKAVCLKFIATSENLRAVMQTDGFEYLKESCPSVLTELLEYVARFTEHSDIMCKHRNEALLDGSDINGRRVKQRL

SEQ ID NO: 30534 - protein, 205 aa, Glycine max
  Clone ID: TF_GmC141051_1.pep
MSMEEPQFREHPKAKIATIPPSQHSDGAAAELRGADCNLASLCEHVQIEGFNSGSFSDIVVNAMGSTYHLHRLILSRSSYFRNMLHGPWKEAGAPVVALHVDDKNVNDEAIAMALAYLYGHHPKLNDNNAFVLAAAVFLDLQDLCGIWTDFIISDLWTLNFLAYKVFAENHDYGMHGERGRTGCWGYLWQSGGMEFEEGAPKLLF

SEQ ID NO: 30535 - protein, 414 aa, Glycine max
  Clone ID: TF_GmC1088_1.pep
MAELEEERMGDFKPFSEGSSCSRSISETVNGSHQFTIKGYSLAKGMGAGKYIMSDTFTVGGYDWAIYFYPDGKNPEDNSMYVSVFIALASDGTDVRALFKLTLVDQSEKGNDKVHSHFDRPLESGPYTLKYKGSMWGYKRFFRRTQLETSEYLKNDCLVMHCTVGVVKTRFEGSKQGVIVPQSDMGRDFKDLLESEVGCDILFKVKSESFKAHKLILAARSPVFRAQFFGLVGDPTLEEVVVEDIEPFIFKAMLLFVYSDKLPGIYEVMDSMPLCSYTVMVQHLLAAADLYNLDRLKLLCESKLCEEINTDNVATTLALAEQHHCPQLKAICLKYIANPANLGAVMQSEAFVHLKESCPSMLLELLETFASVDDNSGQTLSRKRSGSSIYGQDLADGAAAESVNPNGRRVRRRT

SEQ ID NO: 30536 - protein, 125 aa, Glycine max
  Clone ID: TF_GmC127114_1.pep
MAEKLDTRKDSPMMDGGSPALTSSIVTVIVGSDQRLFAAHEDVLSHSPYFAELLRGQFFESANRRIDLPTEEPEIFSCILEYLYKGDYYPRLVQDKRRQTWMLEGAIASPDPNKPGDRAAAVEPT

SEQ ID NO: 30537 - protein, 210 aa, Glycine max
  Clone ID: TF_GmC6844_2.pep
LESGKDSDVSFEGHGEIFAAHKLVLAARSPVFRAQLFGPMKNQNTHCIKVEDMEAPVFKALLHVIYWDSLPDMQELTGLSSKWATTLMAQHLLAAADRYGLERLRLMCETSLCEDVAINTVATTLALAEQHHCFQLKAVCLKFVARPENLRAVMQTDGFEYLKESCPSVLTELLEYVARFTEHSDFLCKHRNEVILDGSDVNGRRVKQRL

SEQ ID NO: 30538 - protein, 190 aa, Glycine max
  Clone ID: TF_GmC1493_3.pep
ARNSARALLHFIYRDTLIDDEELFMSRSSFLPSVSESFAAKLLAAAEKYGLPRLKLMCESVLCKDISIDSVAYILALADRYRATELKSVCLQFSAENLVAVMQSDGFEYLKENCPLLQSELLKTVAGCEEEFSGEGKCRSVWAQFSDGGDTNDRSVRQQTWENGVERSQSLWVHLSDGVNNNDRSPGQEA

SEQ ID NO: 30539 - protein, 212 aa, Glycine max
  Clone ID: TF_GmC976_1.pep
TSQTCHLNHSMHGGEPCSIWAEGFTQQRSNAKAIESLGRMLTEGIHTDITINASDGSIGAHRAVLAARSPVFRSMFSHNLQEKELSTINISDMSLESCQAFLNYLYGIIKHEEFLTHRLALLHAADKYDISDLRDVCHESLLEDIDTKNVLDRLQNASLYQLMKLKMSCIRYLVKFGKIYEIREDFNTFLQNADRDLIAEVFHEVLDAWKGF

SEQ ID NO: 30540 - protein, 410 aa, Glycine max
  Clone ID: TF_GmC337_2.pep
MGKILQETAKPSANSTSAYPSAAPGTTSSMSVTETVRGSHQFKITGYSLSKGIGIGKYMASDVFSVGGYNWAIYFYPDGKSVEDNATYVSLFIALASEGTDVRALFELTLLDQSGKERHKVHSHFERTLESGPYTLKYRGSMWGYKRFFKRTALETSDYLKDDCLSVNCSVGVVRSRTEGPKIYTIAIPPSSIGQKFGHLLESGKGSDVNFEVNDDIFAAHKLVLAARSPVFRAQLFGPMKDQNTQCIKVEDMEAPVFKALLHFIYWDSLPDMQELTGLDSKWASTLMAQHLLAAADRHGLERLRLMCEASLCEDVAINTVATTLALAEQHHCFQLKAVCLKFIATSQNLRAVMQTDGFEYLKESCPSVLTELLEYVARFTEHSDIMCNHRNDALLDGSDINGRRVKQRL

SEQ ID NO: 30541 - protein, 274 aa, Glycine max
  Clone ID: TF_GmC337_3.pep
MYIPFDWGYKRFFKRTALETSDYLKDDCLSVNCSVGVVRSRTEGPKIYTIAIPPSSIGQKFGHLLESGKGSDVNFEVNDDIFAAHKLVLAARSPVFRAQLFGPMKDQNTQCIKVEDMEAPVFKALLHFIYWDSLPDMQELTGLDSKWASTLMAQHLLAAADRHGLERLRLMCEASLCEDVAINTVATTLALAEQHHCFQLKAVCLKFIATSQNLRAVMQTDGFEYLKESCPSVLTELLEYVARFTEHSDIMCNHRNDALLDGSDINGRRVKQRL

SEQ ID NO: 30542 - protein, 328 aa, Glycine max
  Clone ID: TF_GmC141_1.pep
MGGLQIRSRMAKEIVKELLPLIRVYKDGSVERLLSSENVAASPEDPQTGVSSKDIVIADNPYVSARIFLPKSHHTNNKLPIFLYFHGGAFCVESAFSFFVHRYLNILASEANIIAISVDFRLLPHHPIPAAYEDGWTTLKWIASHANNTNTTNPEPWLLNHADFTKVYVGGETSGANIAHNLLLRAGNESLPGDLKILGGLLCCPFFWGSKPIGSEAVEGHEQSLAMKVWNFACPDAPGGIDNPWINPCVPGAPSLATLACSKLLVTITGKDEFRDRDILYHHTVEQSGWQGELQLFDAGDEEHAFQLFKPETHLAKAMIKRLASFLV

SEQ ID NO: 30543 - protein, 649 aa, Glycine max
  unsure (1)..(649): unsure at all Xaa locations
  Clone ID: TF_GmC1416_1.pep
MLLVSPADQVEDEVDAADCYNYKNMDYDKWGLKKFLESWDLSDVLFIVGKEEKPVPGPRAILAASGKFSLCSSSFVINLPTVSYLLFRALLHYIYVGWTQIPQEQLGSLRDLSLQFEVTPLVKQCEETMERFKLDKKLFDTGKNVELTYPSIRPHCSTLPSLPVSTQQLKQLKLTGQYSDVNIYIEGYGLIARAHKIVLSLWSIPFARMFTNGMSESMSSEVTLRDVPPEAFKAMLNFLYDGQLNDKVIDSGVGLVXVLFIVGKEEKPVPAHKAILAASXVSEDSVCPLLQVVSSMPSCRLIKESLQRRISMNFDYYISASTDFVLLDETTLINIIKHPDLTVTSEEKKVLNAILMFGMNAKQLFGWEVVDQLMENSKPELLFGERLQLIYDLLPFVRFPLLQYSLLEKLQHSSIGRHIPVFQNLVNEAINFVKCGLAESENEENVRFQHRRSSYRELQYICDGDDHGVLYFAGTSYGEHPWVNPLLAEPRKITITASSPHSRYTDPKVLVSRTYQGTCFAGPRLENGQNCSWWMVDLGQDHQLMCNYYTSGQNYSKAVPGFWHVQGPRDASIRVFSGFDQSNRIICNPGQFALHILCIPKKLIYWPIIGPNALLPFRYFRVVLTGTTTDATNPWNFCICYLELYGYFL

SEQ ID NO: 30544 - protein, 327 aa, Glycine max
  Clone ID: TF_GmC130_1.pep
MGDRVETLARLAQWKIDNFGLCSYKKSDPFKVGIWNWYFSIVRNRYLYIHLFPEPSQVLKDNPPFARFILRVSNAGSSRSFHISPVQEKLLRTHDDFVWPVDTTFVGRFIIDVEFLDLKICPPNGGETSPVWPSDGNSQSIAFQSSILRCLSRMLDEAIHADLTIMTADGSTLRAHKAVLSASSPVFQSMFHHNLKEKESSTIHIEDMPLESCTALLSYLYGAIKQEDFWKHRLALLGAANKYDIGSLKDICEESLLEDLSAGNVLEMLNEAWLYQLHKLKKGCLVFLFQFGKIHDIKDEINNFFQHADRELMLEMFQEVLSISNPI

SEQ ID NO: 30545 - protein, 318 aa, Glycine max
  Clone ID: TF_GmC141_3.pep
IRLELEPDNVSDFIRVGGIQRLQDGEFIVQATKDCVAKTLKRLEEKIHGRVLNHLLYLMRVSEKAFQRRVALTLAHLCSADDQRKIFIDYNGLELLMGLLGSYNPKQQLDGAVALCKLANKAMTLSPVDAAPPSPTPQVYLGEQYVNNVTLSDVTFLVEGKRFYAHRICLLASSDAFRAMFDGGYREKEARDIEIPNIRWEVFEPMMRFIYTGSVDITLDIAQDLLRAADQYLLEGLKRLCEYTIAQDISLENVSSMYELSEAFNAISLRHTCILFILEHYDKLSGKPGHSHLIQRIIPEIQNYFVKALTKANSNILP

SEQ ID NO: 30546 - protein, 553 aa, Glycine max
  Clone ID: TF_GmC328_2.pep
MKDFNSDLFDPGTVMDSSSSDYSRSASSSDADFGFAFNDSNFSDRILRIEIMGDPVEARPDSDGCTTIADWARHRKRRREDIKKDNVVDLTLLPDEQILNGNQPDMDDFVPSENQDEDAVAMVEEPPSGDEAANSNDSNWNMDCSAVVRVKTLHISSPILAAKSPFFYKLFSNGMKESEQRHVTLRINASEEVSLMELLNFMYSNTLSITSPPALLDVLMAADKFEVASCMRYCSRLLRNIPMTPESALLYLELPSSVLMADAVQPLTDAAKQYLASRYKDITKFQEEVMGLPLAGIEAILSSDELQVASEDAVYDFVLKWVRTQYPKLEERREVLGTRLARLIRFPYMTCRKLKKVLTCNDFDHDVASKLVLEALFFKAEAPHRQRILAAESASFNRLFVERAYKYRPVKVVEFELPRQQCVVYLDLKREECANLFPSGRVYSQAFHLGGQGFFLSAHCNMDQQSSFHCFGLFLGMQEKGSVSFAVDYEFAARSRPTEEFVSKYKGNYVFTGGKAVGYRNLFAIPWTTFMAEDSLYFINGVLHLRAELTIRH

SEQ ID NO: 30547 - protein, 324 aa, Glycine max
  Clone ID: TF_GmC120817_1.pep
MSDSKVETIARLAQWKIDNFGPCSYKKSDPFKLGIWNWFMSIERNRYLYIHIFPEPSRLTKEQPPVARFILRVSNNSGPTRKFYISPVHERVLRTCEDFVWPVDTAFLGRFVIDIEFLDLRTCPVNGETRSVWPSDGKLQTVAAQSTLRCLSRMLDEAIHADLTIITADGTLRAHKAVVSASSTVFHSLYLHNGDEKETSTIHIEDMSQESCMALLSYLYGTIKQQDFWKHRLALLGAANKYEIGDLKDASEESLLEDLNSGNVLDRLNDAWLYQLQALKKGCFSYLFYYGKIYDVRDEMDTFFRHADRELMLEMFQEVLTISK

SEQ ID NO: 30548 - protein, 444 aa, Glycine max
  Clone ID: TF_uC-gmrominsoy195d07_FLI.pep
ENQDEEPDAMVEEPHSGDEATNSNDSDWSMDCSAGAVVRVKTLHISSPILAAKSPFFYKLFSNGMKESDQRHVTLRINASEEVALMELLNFMYSNTLTTTTAPALLDVLMAADKFEVASCMRYCSRLLRNMPMTPDSALLYLELPSSVLMADAVQPLTDAAKQYLAGRYKDITKFQEEVMALPLAGVEAILSSDDLQVASEDAVYDFVLKWSRQQYPKLEDRREVLGARLARLIRFPYMTCRKLKKVLTCSDFDHDIASKLVLEGLFFKAEAPHRQRSLAAEDSASSNRRFVERAYKYRPVKVVEFELPRQQCVVYLDLKREECNNLFPSGRVYSQAFHLGGQGFFLSAHCNMDQQSSFHCFGLFLGMQEKGSVSFAVDYEFAARSRPTEEFVSKYKGNYVFTGGKAVGYRNLFAIPWTSFMAEDSLYFINGVLHLRAELTIKH

SEQ ID NO: 30549 - protein, 281 aa, Glycine max
  Clone ID: TF_GmC1416_4.pep
NSARAQQLKQLKLTGQYSDVNIYIEGYGLIARAHKIVLSLWSIPFARMFTNGMSESMSSEVTLRDVPPEAFKAMLNFLYDGQLNDKVIDSGALLLQLLLLADQFGVTFLQQECCKMLLECLSEDSVCPLLQVVSSMPSCRLIKESLQRRISMNFDYYISASTDFVLLDETTLINIIKHPDLTVTSEEKVLNAILMFGMNAKQLFGWEVVDQLMENSKPELLFGERLQLIYDLLPFVRFPLLQYSLLEKLQHSSIGRHIPVFQNLVNEAINFVKCGLAESEN

SEQ ID NO: 30550 - protein, 308 aa, Glycine max
  unsure (1)..(308): unsure at all Xaa locations
  Clone ID: TF_GmC976_2.pep
MSDSAYRVETTPRLAQWRIENLASCTYRKSDPFKIGNWNWHLSVEKNRVLFVKLFPEISNLTRDNPPIASFIVRVVSSVGDRKAITHPEIKDKVLKNNEDFVWAIEVPLTGKFIIDVEFLDLKTASPNGGEGIMYSLXIWAEGFTQQRSNAKAIESLGRMLTEGIHTDITINASDGSIGAHRAVLAARSPVFRSMFSHNLQEKELSTINISDMSLESCQAFLYYLYGIIKHEEFLTHRLALLQAADKYDISDLRDVCHESLLEDIDTKNVLERLQNASLYQLXNFLRNADRDLISEVFHEVLDAWKGF

SEQ ID NO: 30551 - protein, 301 aa, Glycine max
  unsure (1)..(301): unsure at all Xaa locations
  Clone ID: TF_GmC130_2.pep
MGDRVETLARLAQWKIDNFGPCSYKKSDPFKLGIWNWXLKDNPPFSRFVLRVSXLHISPVQEKLLRTHDDFVWPVDTTFVGRLIIDVEFLDLKICPPNGGETSSVWPSDGNSQSIAFQNNTLGCLSRMLDEAIHACLPIMTADGSTLRAHKAVLSASSPVFQSMYHLNLKEKXSSTIHIEDMSLESCTALLSYLYGTIKQEDFWKHRLALLGAANKXDIGSLKDICEESLLEDLSTRNVLEKLNEAWLYQLHKLKKGCLVFLFQFGKIHDIKDEINNFFQHADKELMLEMFQEVPSISNPV

SEQ ID NO: 30552 - protein, 388 aa, Glycine max
  unsure (1)..(388): unsure at all Xaa locations
  Clone ID: TF_GmC1467_1.pep
MAGAALSPPTSSKSVTQTVNGSHKFVIEGYSLAKGMGVGKHIASDVFTVGGFHWAIYFYPDGKNPEDNSAYVSVFIALASEGTDVRALFELTLLDQSGQGKHKVHSGYLSQALXYGKLMLDQSESMLGYKRFFRRSLLETSEFLKNDCLKINCTVGVVVSAIDCPQLHSINIPESDIGSHFGALLDNMEGSDITFDVAGDKFPAHKLVLAARSPEFRSKFFNGLDEEKNEIIVTDLEPKVFKAMLHFIYKDTLTEEVDTVSSTTTSDFPVSEILTAKLLAAADKYDLGRLRLMCESRLCKDICVNSVANILTLADHCHATELKAVCLKFAAQNLAAVMRSDGFEHMKEKGPWLQSEILKTIAGCEGDGCSAVEXSLRVYGANFQMAVT

SEQ ID NO: 30553 - protein, 434 aa, Glycine max
  Clone ID: TF_GmC1493_1.pep
MHTASRSNGGGGGVLASRTSSRSVTETVNGSHKFVIKGYSLAKGIGVGKHIASETFTVGGYQWAIYFYPDGKNPEDNSAYVSVFIALASEGTDVRALFELTLLDQSGNGKHKVHSHFDRSLESGPYTLKYRGSMWGYKRFFKRAQLEASTFLKDDCLKINCTVGVVVSSIDCSKLNTIQVPESDIGAHFGMLLENEEGSDVTFSVGGERFHAHKLVLAARSTAFETEFFNGMEEDDHDVVVTDMEPKVFKALLHFIYRDTLIDDEELFMSRSSFLPSVSESFAAKLLAAAEKYGLPRLKLMCESVLCKDISIDSVAYILALADRYRATELKSVCLQFSAENLVAVMQSDGFEYLKENCPLLQSELLKTVAGCEEEFSGEGKCRSVWAQFSDGGDTNDRSVRQQTWENGVERSQSLWVHLSDGVNNNDRSPGQET

SEQ ID NO: 30554 - protein, 259 aa, Glycine max
  Clone ID: TF_GmC141_7.pep
GSRKGPTRPVALALAHLCSSDDQRIIFIDHYGLELLIGLLGSSSSKQQLDGAVALSKLANKALTLSPVDAAPPSPTPQVYLGEQYVNNATLSDVTFLVEGKRFYAHRICLLASSDAFRAMFDGGYTEKEARDIEIPNIRWEVFELMMRFVYCGSVDVTLDIALDLLRAANQYLLEGLKRLCEYTIAQDISPENVSSMYELSEAFNAISLRHACILFILEQFDKLSSRPGHSLLIQRIIPEIRNYFVKALTKANSHDNQL

SEQ ID NO: 30555 - protein, 520 aa, Glycine max
  Clone ID: TF_GmC44146_1.pep
MTEADTDDVGTKCNFSFAFNNINFSDRILNIEVIPDPHFIRAQSHSLSTLAPNRKRRRLSLMKANDVLLQPEEKLNCNLPDAEEVVAITEASLSGDEVSHGNDSSLGMSWSKVLRVRTIQISSPILAEKSPFFYKLFSNVTRESKQQNVTLQIHDSEEAAVMDLLNFMYSNTLSRTTSAAVLDVLMAADKFEVMSCIRYCSRMLGLMPMTCESALLYLDLPSNILTLDAIQPLVDTAKLFLATHYRDITKFADELLNLPLAGIEAVLSSDDLQMPSEDVVFEFVLKWARIHYPKIEDRKDVLEARLGRLIRFPYMSSRKLKKVLTCNDFHPDFASRVRLEALFYKAETPYRQRSLAAQDAGTTYSRLVERAYKLRHVKVVEFALPRPRCVVYLDLKKEECAQFFPNARIYSQAFPLGEQWFFLSARCNMDQQNASHCFGLFLAVQFKGSVSLHVDYEFAARSKSTEEYISRCKGDYTFTAGKAVGYRNLFGIPWTAFIADDSHFFIKGLLHLRAELTIRQ

SEQ ID NO: 30556 - protein, 146 aa, Glycine max
  Clone ID: TF_GmC581776_1.pep
ARSEIFKNMLECDECKAAPSNAITIPDLNHEELESLLEFLYSGTLNVEKLEKHVYALSQAADKYVIPHLLKHFERYMLSSISTSNGLEALGIADTCSNLKVKEPTLNFLVKNIEHMVSSPKFEAFVHRSPHLNVELVARAFVNGAK

SEQ ID NO: 30557 - protein, 187 aa, Glycine max
  Clone ID: TF_GmC129068_1.pep
MSLEESLRSLSLDYLNLLINGQAFSDVTFSVEGRLVHAHRCILAARSLFFRKFFCGPDAPCGLDPAGPRGVNSSRSGVIPVNSVGYEVFLLMLQFLYSGQVSIVPQKHEARPNCGERGCWHTHCTSAVDLALDTLAAARYFGVEPLALLTQKQLASMVEKASIEDVMKVLLASRKQDMQQLWSTCSH

SEQ ID NO: 30558 - protein, 545 aa, Glycine max
  Clone ID: TF_GmC141_2.pep
SQKWVLWHGFNSSRIGSSTNLAHENSSIKTRVRKEGGIPPLVHLLEFADTKVQRAAAGALRTLAFKNDENKNQIVECNALPTLILMLRSEDAAIHYEAVGVIGNLVHSSPDIKKEVLLAGALQPVIGLLSSCCSESQREAALLLGQFAATDSDCKVHIVQRGAVRPLIEMLQSSDVQLKEMSAFALGRLAQDTHNQAGIVHNGGLMPLLKLLDSKNGSLQHNAAFALYGLADNEDNVSDFIRVGGIQRLQDGEFIVQATKDCVAKTLKRLEEKIHGRVLNHLLYLMRVSEKAFQRRVALTLAHLCSADDQRKIFIDYNGLELLMGLLGSYNPKQQLDGAVALCKLANKAMTLSPVDAAPPSPTPQVYLGEQYVNNATLSDVTFLVEGKRFYAHRICLLASSDAFRAMFDGGYREKEARDIEIPNIRWEVFELMMRFIYTGSVDITLDIAQDLLRAADQYLLEGLKRLCEYTIAQDISLENVSSMYELSEAFNAISLRHTCILFILEHYDKLGGKPGHSQLIQHIIPEIQNYFVKAITKANSNIQP

SEQ ID NO: 30559 - protein, 491 aa, Glycine max
  Clone ID: TF_GmC1802_1.pep
MASSKTTNPTTTTTQLEPLPPPQQRHPPPPHHQLQQHHHHHHHHQQIHDHHQISFGMMQSSSSFSSIPGNYLISKDSGAYDLGELDQAFFLYLDGQADPSSVQDQRQNSSSGMRPPTLNIFPSKPMHVEPSSSKAKANIELVSPQTSGSKRPSEPSMELANPRNETASAPQPPKPVKRESNRKGPTSSSEHEGPKTPDPKTLRRLAQNREAARKSRLRKKAYVQQLESSRIRLNQLEQELQRARTQGMFLGGGALLGGEQGLPVTMNTISTEAAMFDVEYARWQEEHHRIVCELRAAVQEHLPENELRLFVDNCLAHYDQVMNLKSLVAKTDVFHLVSGTWKTPAERCFMWIGGFRPSELIKIIVRQIEPLTEQQILGICGLQQSTQEAEEALSQGLEALNQSLSDTITSDSLSYPPNMANYMGQMAVAMNKLSTLEGFVRQADNQRHQTIHRLHQILTTRQAARCFLAIAEYFHRLRALSSLWLARPRQE

SEQ ID NO: 30560 - protein, 383 aa, Glycine max
  Clone ID: TF_GmC6275_4.pep
MNSASPQFVSSRRMSVYDPIHQISMWGEGFKSNGNLSAAMPLIDETDMKFDSQSEDASHGILGEPNKYDQEANKPTDKGDNDKYVSPAILDFEESVFNLDIQRRLAQNREAARKSRLRKKAYVQQLESSRLKLMQLEQELERARQQATKLQGIYIGGGLDSNHLGFAGSVNSGITTFEMEYGHWVNEQNRQITELRNALNAHIGDVELRILVDGMMSHYAEMFRMKSAAAKADVFYVMSGMWKTTAERFFLWIGGFRPSELLKVLGPLIEPLTEQQRLDIYNLGQSCQQAEDALSQGMDKLRQTLADSVAAGQFMEGTYIPQMTSAMDKLKALVSFVNQETLQQMSRILTIRQAARCLLALGEYFQRLRALSSLWSNRPREPA

SEQ ID NO: 30561 - protein, 64 aa, Glycine max
  Clone ID: TF_LIB4198-005-Q1-N1-F7.pep
KNRESAARSRARKQAYTTELEHKVSRLEEENEKLRRQQELEKMLSSNPPPEPRYQIRRTSSASF

SEQ ID NO: 30562 - protein, 381 aa, Glycine max
  unsure (1)..(381): unsure at all Xaa locations
  Clone ID: TF_GmC1880_2.pep
MDRDNKSPPPSSLYVKSSSSSFSHDDISAMPENPPKNRGHRRAHSEIITLPDDLSFDADLLPDDDNDLLSLYLQFDQLDSSSLPPPPPPPPPHNNINERSTRVRHQHSHSMDGSIHLEMLLSAASAADDVSGGIDTKKAMSADKLAELALVDPKRAKRIWANRQSAARSKERKMRYISELERKVQTLQTEXTSLSAQLTLLQRDTHGNDCXLKRVDCPIASMEQHVEIHMDXTDAFSELKLRLQTMEQQVHLQDALNDALKEEIQHLKALTGQVMPNGGPVNFASFGGGQQFYPNNQAMHTLLAAQKFQQLQIHSQKQQQHQLQQQQQFQHQLQQQQQFHQQQQQLQLQQQLQQQQQQQQQQQQQQTAATGTVTSTNGGHE

SEQ ID NO: 30563 - protein, 84 aa, Glycine max
  unsure (1)..(84): unsure at all Xaa locations
  Clone ID: TF_jC-gmro02910021c05d1.pep
QNPQIQTNPMASIPRPAAMDERKRKRMESNRESDXRSRMKKQKLLEDLSDVXSRLQGENVRLAQSIKAKEGAYVEIEAANDILR

SEQ ID NO: 30564 - protein, 284 aa, Glycine max
  Clone ID: TF_GmC1347_1.pep
MDELEETLLTQIDWESFLDDIPELNVDDFLQDDNAVPVVTDNHSSPNDDPVLSEIENMLMTQAENDAVVLPETPSSEAGYYKLFEEILVEEPKEGPVSPPSKIESEEGSDKDKTDDAASDEPMSKKLKRQLRNRDAAVRSRERKKLYVKNLEMKSRYLEGECRRLGHLLQCCYAENNALRLCLQLRGTYGASMTMQESAVLLLEPLLLGSLLWCMGIICHLSLPLMLWVAAVLPRENIEQKGLRRVTQKGSESKISECFQMQSFLKSRKSRASRTKMKFNFIVF

SEQ ID NO: 30565 - protein, 85 aa, Glycine max
  Clone ID: TF_GmC726_2.pep
PFPGADTDSVTVPQWQSYCLLISTLIPCMLNVCDMNLNRILHDQTSSSKKKKDSILREDPLTKRKVQKIQEAKGVCECNSYLIRL

SEQ ID NO: 30566 - protein, 151 aa, Glycine max
  Clone ID: TF_LIB4390-054-R1-K2-B7.pep
FEEILVEEPKEGPVSPPSKIESEEGSDKDKTDDAASDEPMSKKLKRQLRNRDAAVRSRERKKLYVKNLEMKSRYLEGECRRLGHLLQCCYAENNALRLCLQLRGTYGASMTMQESAVLLLGKACDCKLYYLLLPLLFCFGHSVETTTTLLD

SEQ ID NO: 30567 - protein, 146 aa, Glycine max
  unsure (1)..(146): unsure at all Xaa locations
  Clone ID: TF_LIB3138-098-P1-N1-A10.pep
PEFPVDPRVRPNGVQALQTLTMTNSSSAQQGAILQYAQTSDGQQILXPSNQVVVQTASGDMQTYQIRTTPSATSLPQTMVMTSPVTLTSQTTKTDDPQLKREIRLMKNREAARECRRKXKKEYVKCLENRVAVLENQNKTLIEELK

SEQ ID NO: 30568 - protein, 321 aa, Glycine max
  Clone ID: TF_GmC505_1.pep
MVGTIRLEQSEYIPREPREPSGSGADQETTNKDVNKMLRRLAQNREAARKSRLRKKAYVKQLESSRLKLMQLELEIGKARKQGLYMGTALDAGYIGSTSETINPGIVAFEIEYGQWVEEQERRNEELRHAFQTQAPGVQLNVVVQSVLNHYSNLFRMKAEAVKADVLYLLSGAWKPSVERIFLWIGGSRPSQLLNIIVPQLEPLTDQQIVSINNLRLSSQQAEDALSQGLEKLQQSLVHDMAVDPLGVGNLGLQMARTMEKFEALEGFVNQADHLRQQTLLHMSRILSIHQAARGLLALGEYFHRLRTLCSLWSARSCELA

SEQ ID NO: 30569 - protein, 232 aa, Glycine max
  unsure (1)..(232): unsure at all Xaa locations
  Clone ID: TF_GmC293864_1.pep
MATSNSRKSETSPSPSPTTNFIPIPAAPAPKTVDDVWREIVAGDRRECKEEAPDDDYDKEMMTLEDFLAKADQDQEPDYDNXQLKMPMPLTERLGSGTLFSFDHLPTTPFHDSAAAEGSVIGFGNGVEVVEGGRVKRRRPVLEQLDKAAQQRQRRMIXKNRESAARSRERKQAYQVELESLAVKLEEENDKLLKEKAERKKERYKQLMEKVLPIAQKQKPPCILRRARSLQW

SEQ ID NO: 30570 - protein, 460 aa, Glycine max
  unsure (1)..(460): unsure at all Xaa locations
  Clone ID: TF_GmC217_1.pep
MGSRSRTVNVXTTKDTDKVLNGMPSYAPPLPSSNSIAMEATNAHPSRISEFGTLEQSLGFRVEDTINLSRNPMFNQMKSNSQALGADIQFGALNKSIATSDINLSAAIAASQALVFQKDSQPTLASTSAGRENWGETNLADASPRTDTSTDDTEDKNQRPERGESSGSKDKSDQKTLRRLAQNREAARKSRLRKKAYVQQLESSRLKLTQLEQELQRARQQGIFISSTGDQAQSMSGNGAMAFDVEYARWLEEHNRQTNELRAAINSHAGDIELRTIVDNFMTQFDDIFRLKGIAAKADVFHILSGMWKTPAERCFMWIGGFRSSELLKLLESQLEPLTEQQLMGIYNLQQSSQQAEDALSQGMDALQQSLSETLANGSPSTSGSSGNVANYMGQMAMAMGKLGTLDGFLHQADNLRQQTLQQMLRILTTRQSARALLAISDYFSRLRALSSLWLARPRE

SEQ ID NO: 30571 - protein, 391 aa, Glycine max
  unsure (1)..(391): unsure at all Xaa locations
  Clone ID: TF_GmC420_1.pep
VSSQTISRVPVQVDSFDKLPTSLDKNPLTNQTEXQSLQLQKVQLSNLVSGDTEHQEESAMADASPRTDISTDVDTDDKNPRFDRSQSLVAVASDSSDRSKDKSDQKTLRRLAQNREAARKSRLRKKAYVQQLESSRLKLTQLEQELQRARQQGIFISNSGDQAHSMSGNGAMAFDVEYARWLEEQNRQINELRAAVNSHAGDTELRMIIDGIMAHYDEIFRLKANAAKADVFHLLSGMWKTPAERCFLWLGGFRSSELLKLLVNQLEPLTEQQLVGITNLQHGIXQAEDALSQGMEALQQSLSETLSTGSPGSSGSSGNVANYMGQMAMAMGKLGTLEGFIKQADNLRQQTLHQIHRILTTRQSARALLAIHDYFSRLRALSSLWLARPRD

SEQ ID NO: 30572 - protein, 159 aa, Glycine max
  unsure (1)..(159): unsure at all Xaa locations
  Clone ID: TF_jC-gmro02800043g12a1.pep
GSRLDNQFQVQSEDDTHGIFGTSVKYDQDTNRLTDKTQRRLAQNREAARKSRLRKKAYVQQLESCRVKLLQLEQEVDHAKQQGLYIGNGLGSNNLGFAGSVNSRITLFKMEYGNWVEEQNRQILELRTAXSSHIGDIQLGTLVQGIMNHYTXLFGMKSA

SEQ ID NO: 30573 - protein, 252 aa, Glycine max
  Clone ID: TF_GmC107_2.pep
MGKYDKYDVEKHRDANVSGDDAFARLYASVDADIVALLQKAESASKEKGKASAVAINAEIRRTKARLLEEVPKLQRLAVKKVKGLSSQEFAARNDLVLALPDRIQAIPDGAPPVPKQTGGWAASASRPEIKFDSDGRFDDEYFQQSEQSSQFRQEYEMRRMKQDQGLDVIAEGLDTLKNMAHDMNEELDRQVPLMDEIDTKVDKASSDLKNTNVRLKDTVNQLRSSRNFCIDIVLLIIILGIAAYLYNVLKK

SEQ ID NO: 30574 - protein, 196 aa, Glycine max
  unsure (1)..(196): unsure at all Xaa locations
  Clone ID: TF_GmC128657_1.pep
MQAREITGLNYLLPSDPCPYPGHYSMVQNTIPTFQLHKLSNQFYGLQKPPPKVLADFSPPQSSCISSNSTSDEADEQQQSLINERKHRRMISNRESARRSRMRKQKHLDELWSQVVWLRNENHXLMDKLNHVSESHDKVAQENVQLREEASELRQMICDMQLHSPYHPPPLSPIDDDVSPYVKSDSSITDSLDLLG

SEQ ID NO: 30575 - protein, 382 aa, Glycine max
  Clone ID: TF_GmC6275_3.pep
MNSASPQFVSSRRMSVYDPIHQISMWGEGFKSNGNLSAAMPLIDETDMKFDSQSEDASHGILGEPNKYDQEANKPTDKGSNMIQRRLAQNREAARKSRLRKKAYVQQLESSRLKLMQLEQELERARQQGIYIGGGLDSNHLGFAGSVNSGITTFEMEYGHWVNEQNRQITELRNALNAHIGDVELRILVDGMMSHYAEMFRMKSAAAKADVFYVMSGMWKTTAERFFLWIGGFRPSELLKVLGPLIEPLTEQQRLDIYNLGQSCQQAEDALSQGMDKLRQTLADSVAAGQFMEGTYIPQMTSAMDKLKALVSFVNQFFGLRVLLKLFEAIDLADHLRQETLQQMSRILTIRQAARCLLALGEYFQRLRALSSLWSNRPREPA

SEQ ID NO: 30576 - protein, 355 aa, Glycine max
  Clone ID: TF_GmC486_1.pep
MGLPSTQTSTGSKRQPETSMAKPNPHTEAPSAPEPPKAVKREGNRKGTTSSSEQEAPKTPDPKTLRRLAQNREAARKSRLRKKAYVQQLESSRIKLNQIEQELQRSRAQGILMGGNTLLGGEQGFPMAMSGISSEAAMFDVEYARWLEEHHRIVCELRAVLQEHLHENELRLYVDNCLAHYDQVMNLKSMVAKTDVFHLVFGVWKTPAERCFMWIGGFRPSELIKIILGQIEPLTEQQILGICGLQQSTQEAEEALSQGLDALNQSLSETITSDSLWCPPNMTNYMGQMAVAINKLSTLESFVRQADNLRHQTIHRLHQLLTTRQAARCLVAISEYFHRLRALSSLWSTRPRQDQ

SEQ ID NO: 30577 - protein, 386 aa, Glycine max
  unsure (1)..(386): unsure at all Xaa locations
  Clone ID: TF_GmC299_1.pep
MDRVFSVDDISDHFWQPPIPVSAAQTSSQMSRSASEWAFQRFLQEASASAPSPPSSSSAADVVFVEIEDQPKPAPPPPSNGAVLPNAPGPVPLDSDEYQAFLKSKLNLACAAVAMTRGSLAKSQDPSPFSEGSIPSENDPSKLQDKDTNVPVGIPSIPAMQKKPAVAIRPSTSGSSREQSDDEDIEGETSMNATTDPPIVKRVRRMLSNRESARRSRRRKQAHLTDLEXTQVSQLRSENSTLLKRLTDVSQKYSDSAVDNRVLKADVETLRTKVKMAEETVKRITGLNPLLHAMSDISSLGLPSFDGRSPSDTSADAAVPVQDDPHHHFYQPTSTNPIPSHDPIVNNGLGGISSIENVQQNAAVVLGGNKMGQTASLQRVASLEHL

SEQ ID NO: 30578 - protein, 82 aa, Glycine max
  Clone ID: TF_GmC1611_1.pep
NSRKGAGYTSVKPLDAKTLRRLAQNREAARKSRLRKKAYVQQLESSRLKLTHLEQDLQRARSQDEFMGCGGAGGSISSGEFN

SEQ ID NO: 30579 - protein, 227 aa, Glycine max
  Clone ID: TF_GmC80973_1.pep
MNSTKQKNRSWDSFSNAMTNPVGVPSGKDSAAFQSSGLQCTPHEADALPPAASEKHDSVELGLQDAKSFPEKKDISHAKSSASETDTKRAKQQFAQRSRVRKLQYIAELERNVQALQAEGSEVSAELEFLNQQNLILSMENKALKQRLENIAQEQLIKYLEQEVLEREIGRLRALYQQQQQPPQTQPQQQPSGSHRRSNSRELESQFANLSLKHKDTNSGQDPALRI

SEQ ID NO: 30580 - protein, 221 aa, Glycine max
  Clone ID: TF_LIB4280-018-R1-K1-F1.pep
MATQTQDPRSNPNPNPNAMSATPSSSFFIRAAGGNGPSAAPVAGSGESHSHHRRAHSEVSFRLPDDMIDLSPSDPFNGGSSTASFEEIGSEDDLFSTYIDVEKLGAGRGGNGSDQSGYGNGAGSSCYNDGEKSPSTAAARPRHRHSSSVDGSTSTSMFGEIMDAKKAMPPDKLAELWNIDPKRAKRILANRQSAARSKERKARYIQELERKVQTLQTEATT

SEQ ID NO: 30581 - protein, 72 aa, Glycine max
  unsure (1)..(72): unsure at all Xaa locations
  Clone ID: TF_LIB3242-186-Q1-J1-C6.pep
RILSNRESXILSRMRNQAHLTDLDTQVSQLRTENSSVIKQLTDVSHKYNNTAFYNRILNTDVATLITNVKIC

SEQ ID NO: 30582 - protein, 100 aa, Glycine max
  unsure (1)..(100): unsure at all Xaa locations
  Clone ID: TF_LIB3056-014-Q1-N1-C12.pep
RADYVREWTALDSQSTGRYTSASGGEVVRTAXRMHTRLILNKESAARSQSXXQAYAHELEIKVSRLEDANVRIKRLNEMESALTSVPTAEPRPKLQLIRT

SEQ ID NO: 30583 - protein, 217 aa, Glycine max
  Clone ID: TF_GmC2191_1.pep
IANCAVGSPVSANKPEGRENHTKGATSGSSEPSDEDDEAGACEQSTNPADMKRLRRKVSNRDSARRSRRRKQAQLSDLELQVEKLKVENATLYKQFTDASQHFREADTNNRVLKSDVEALRAKVKLAEDMVTRSSFTTLNNQLLQTQHHQMSTPQQLNTTNLRRMAHVSPTITVHGNDVSYNNGGQNSALGNLDMSFNDINEVMNDAMSCGTIWPLD

SEQ ID NO: 30584 - protein, 115 aa, Glycine max
  unsure (1)..(115): unsure at all Xaa locations
  Clone ID: TF_jC-gmXLIB3563P051cd04a1.pep
MNSASPQFVSSRRMSVYDPIHQISMWGEGFKSNGNLSAAMPLIDETDMKFDSQSEDASHGILGEPNKYDQEANKPTDKIQRRLAQNREAARKSRLRKKAYVQQXESSRLKLMQLE

SEQ ID NO: 30585 - protein, 228 aa, Glycine max
  unsure (1)..(228): unsure at all Xaa locations
  Clone ID: TF_GmC420_3.pep
WCVWSRAGVCVEDEKGTARGMPSFDSQLPNSNACYTEGSAIDSFCVFDFDQSVGYRIEDCVALRGNSVFDSLKVSSQTISRGPVEVDSFDKLPTSLNKNPLTSQTERQRLQLQKVQLSNLVSGDTEHQEESAMADASPRTDISTDVDTDDKNPRFDRSQSLVAVVSDSSDRSKDKSDQKTLRRLAQNREAARKSRLRKKXYVQQLESSRLKLTQLEQELQRARQQGNH

SEQ ID NO: 30586 - protein, 91 aa, Glycine max
  unsure (1)..(91): unsure at all Xaa locations
  Clone ID: TF_GmC76867_1.pep
MDERKRKPMESNRKSARRSRMKKQKLLEDLTDXRRKHMLRWKLRMILRAQTMELVGWLRFLNSILEIADEVGSGGESFEILQILNSLLMPW

SEQ ID NO: 30587 - protein, 111 aa, Glycine max
  Clone ID: TF_LIB3056-004-Q1-N1-G6.pep
MNSASPQFVSSRRMSVYDPIHQISMWGEGFKSNGNLSAAMPLIDETDMKFDSQSEDASHGILGEPNKYDQEANKPTDKIQRRLAQNREAARKSRLRKKAYVQQLESSRLKL

SEQ ID NO: 30588 - protein, 337 aa, Glycine max
  unsure (1)..(337): unsure at all Xaa locations
  Clone ID: TF_GmC114277_2.pep
MDATSSQFVSSRRMGVYDPIHQISMWEETFKSNDTNNLTVSTSIIGEVEMKLDNQVHVQSEDASHGIFGTSVKYDQDANRLTDKPRTQRRLAQNREAARKSRLRKKVXKAYVQQLESCRLKLVQLEQEVDHAKQQATKLQGLYIGDGLGSNNLGFAGSVNSGITLFKMEYGNWLEEQNRQILELRTALSSHIGDIQLGTLVQGIMNHYTKLFSMKSAAAKADVFYVMSGMWKTTAERFFLWIGGFRPSELLKVLVPLREPLTEQQRFDAYGLEKSCQQAEDALSQGMEKLQQMLADSVGPGQLVEGTHIPQMDTAMERLEALVSFVNQEKERKFSQG

SEQ ID NO: 30589 - protein, 191 aa, Glycine max
  Clone ID: TF_GmC667331_1.pep
MSLPRPSEGKAPSQLKEGVAPAAAAASSSSSWNNRLHTFPPLSLHNKSSKIEDSDEDMFTVPDVETTPVSVHSAATLQNSNLTQRNVTDPQFQTGFPGKRRRGRNPADKEHRRLKRLLRNRVSAQQAREREKVYVNDLESRAKELQDKNAILEERISTLINENTMLRKVLMNARPKTDDSIEQKQDQLSKS

SEQ ID NO: 30590 - protein, 418 aa, Glycine max
  unsure (1)..(418): unsure at all Xaa locations
  Clone ID: TF_GmC383_1.pep
MGSSDMDKTPKEKESKTPPATSQEQSSTTAMPTTNPDWSNFQTYSPIPPQGFLASSPQAHPYMXGVQHYMPSYGTPPHPYVAMYPHGGIYAHPSIPPGSYPFXSPFAMASPNGIADASGNAPGRIEVGGKPPEVKEKLPIKRSKGSASGGNLNMWITGKNNEPGKIPGESANGIHSKSGESASDGTSEGSDENSQNDSQLKSRERQDSFEDEPSQNGSSVHAPQNGVHNRPQTVVNQTMSILPISTTSAPGAVPGPTTNLNIGMDYWGTPTSSTIPALHGKVPSTAVAGGMIAAGSRDGVQSQVWLQDERELKRQRRKQSNRESARRSRLRKQAECDELAQRAEALKEENATLRSEVSQIRSEYEQLRSENAALKERLGDIPGVATPGKEDLRSGQNDQHVSNDTQQSGQTEVVQGVH

SEQ ID NO: 30591 - protein, 387 aa, Glycine max
  Clone ID: TF_GmC754_1.pep
MVIEEGEMKSQGEVESWLQQEAKKNHHSPLFSSSSYLGRQTSSIYSLTLDEFQHSLCESGKNFGSMNMDEFLSSIWNAEENSQAITNNNVPLSSTLTILRKQPSLPRQPSLSLPAPLCRKTVDEVWSQIQKEQNKNNNISNVLNDNTESAPRQPTFGEMTLEDFLVKAGVVRETTCAPPLPVSHSHQPHYANNNNNVAMAPSFVGRHVGAVSNVVAPGYQQVVGEASGGYGKRDHNGGGYHCFGGGGGGYGVGPTMGMGGPVSPANSSDGIGNDGGQFGLDMGGLRGRKRVVDGPVEKVVERRQRRMIKNRESAARSRARKQAYTVELEAELNQLREENSQLKQALAELERGRKQQCFEEVNVSVKTKAQKAKEKLRALRRNMSCPL

SEQ ID NO: 30592 - protein, 214 aa, Glycine max
  Clone ID: TF_GmC299_3.pep
KAFILFSSGTGTNSALFNLKPNNLSFRMLSNRESARRSRRRKQAHLTELETQVSQLRSENSSLLKRFTDVSQKYNNAAVDNRVLKADVETLRTKVKMAEETVKRITGLNPMLHAITEMSSMAMPSFDESPSETSADAAVSVQEDPNHHRCQPTSNNGLGGISSIETVQQNVAAVVGGNKTGRTTSLHRVASLEHLQKRIRGGADSRGPPSNGEQ

SEQ ID NO: 30593 - protein, 120 aa, Glycine max
  Clone ID: TF_GmC609_3.pep
IGMDLWNASSGGAEAAKMRHNQSGAPGVALGDQWVQDERELKRQKRKQSNRESARRSRLRKQAECEELQKRVESLGGENQTLREELQRLSEECEKLTSENNSIKEELERLCGPEAVANLD

SEQ ID NO: 30594 - protein, 122 aa, Glycine max
  Clone ID: TF_GmC143038_1.pep
TTTTHSVSVSSFLNQPLSTFLTLTSTSSSSSVFHKHDHSLLSVSDPNTLQDQRHTRVIKNRESAVRSRARKQAYRKGLEVEISRLTEENSRLKRQLKELQRCLCSSHTPRMAAPCRTSSSPF

SEQ ID NO: 30595 - protein, 152 aa, Glycine max
  Clone ID: TF_GmC535_1.pep
MASIPRPASSGSSEGGGDPAAMDERKRKRMESNRESARRSRMKKQKLLEDLSDVASRLQGENVRLAQSIKAKEEAYVEIEAANDILRAQTMELADRLRFLNSILEIADEVGGGGESFEIPQIPDPLFMPWQIPHPMMASPDMLLHGNQGLFA

SEQ ID NO: 30596 - protein, 136 aa, Glycine max
  unsure (1)..(136): unsure at all Xaa locations
  Clone ID: TF_GmC535_2.pep
MASIPRPASSGSSEGGGDPAAMDERKRKRMESNRESARRSRMKKQKLLEDLSDVASRLQGENVRLAQSIKAKEEAYVEIEAANDILRAQTMELADRLRLLNSILEIADEVDGGGXSFEIPQIPDPLFMHWQIPHPM

SEQ ID NO: 30597 - protein, 173 aa, Glycine max
  unsure (1)..(173): unsure at all Xaa locations
  Clone ID: TF_GmC6275_5.pep
MNSASPQFVSSRRMSVYDPIHQISMWGEGFKSNGNLSAAMPLIDETDMKFDSQSEDASHGILGEPNKYDQEANKPTDKIQRRLAQNREAARKSRLRKKAYVQQLESSRLKLMQLEQELERARQQGIYIGGGLDSNHLGFAGSVNSGITTFEMEYGHWVNEQXTITELRNALML

SEQ ID NO: 30598 - protein, 517 aa, Glycine max
  Clone ID: TF_GmC853_1.pep
FAESVEGVEQRKSSISGGPVLRPPNQKHGIPPSHPNINISPSATPCSRYSQRLRSPGSSHSRSLSQSPIFSLDSLPPLSPSPAAVTSMFDSISTTDMSVEESNVSSQVPLNGGHALLPPRKGHRRSSSDSPLGISGFMQSSPVPSGGESSGFEKPIQLVLKASFRDSLDGGHANEPVNGRKEEAADDLFREYMNLDNFDNLNFPGMEDKDLDSRTSGSKTVESSDNEVESHVNGKASGAQGASSSCSEERREGVKRSSNGEVAPGSRHRRSFSLDSSIGNFNIEDGLPKLPPSKNQMGQHSPSNSMDGKMSETSTEFGNGEFSAEEVKKIMESDKLAEIASTDPKRAKRILANRQSAARSKERKMRYIAELEHKVQTLQTETTTLSTQFTKLQRDNSDLKSENNECKLRLQAMEQQSLLKDALNETLDAEVRRLRRAVAELGGESLTSCMARQLAINQQMFELQHQQPSQQRHFLLQNHHTQEEIESRSQQIQGNELHPQAQIQSQQIQRNELHPQP

SEQ ID NO: 30599 - protein, 341 aa, Glycine max
  Clone ID: TF_GmC609_7.pep
MGTGEESTAKVPKPSSTSSIQIPLAPSYPDWSSSMQAYYAPGATPPAFFASNIASPTPHSYMWGSQHPLIPPYSTPVPYPAIYPPGNVYAHPSMAMTLSTTQNGTEFVGKGSDGKDRVSAKSSKAVSANNGSKAGNNGKASSGPRNDGTSTSAESGSEGSSDASDENTNQQESATNKKGSFDQMLVDGANARNNSVSIIPQPGNPAVSMSPTSLNIGMNLWNASPAGDEAAKMRQNQSSGAVTPPTIMGREVALGEHWIQDERELKKQKRKQSNRESARRSRLRKQAECEELQKRVESLGSENQTLREELQRVSEECKKLTSENDSIQGRVRTIVWTRSSC

SEQ ID NO: 30600 - protein, 149 aa, Glycine max
  Clone ID: TF_GmC1648_1.pep
MACSSGTSSGATSSMLQNNSGSEEELQALMEQRKRKRMISNRESARRSRMRKQKHLDDLASQVTQLRNENHQILTSVNLTTQNHKYLAVEAENSVLRAQVNELSHRLDSLNQIIHLLNFFEPDASTSTFFNNPFNFSLPIMASADMLQY

SEQ ID NO: 30601 - protein, 282 aa, Glycine max
  unsure (1)..(282): unsure at all Xaa locations
  Clone ID: TF_GmC217_2.pep
NREAARKSRLRKKAYVQQLESSRLKLTQLEQELQRSRQQGIFISSTGDQAQSMSGNGAMAFDVEYARWLEEHNRQTNELRAAINSHAGDIELRTIVDNFMTQFDDIFRLKGIAAKADVFHILSGMWKTPAERCFMWIGGFRSSELLPREKFLLSIQLEPLAEQQLMGIYNLQQSSQQTEDALSQGMDALQQSLSETLANGSPSSSGXSGNVANYMGQMAMAMGKLGTLEGFLHQADNLRQQTLQQMLRILTTRQSARALLAISDYFSRLRALSSLWLARPRE

SEQ ID NO: 30602 - protein, 370 aa, Glycine max
  Clone ID: TF_GmC114277_1.pep
MDATSSQFVSSRRMGVYDPIHQISMWEETFKSNDTNNLTVSTSIIGEVEMKLDNQVHVQSEDASHGIFGTSVKYDQDANRLTDKTQRRLAQNREAARKSRLRKKAYVQQLESCRLKLVQLEQEVDHAKQQATKLQGLYIGDGLGSNNLGFAGSMEYGNWLEEQNRQILELRTALSSHIGDIQLGTLVQGIMNHYTKLFSMKSAAAKADVFYVMSGMWKTTAERFFLWIGGFRPSELLKVLVPLSEPLTEQQRFDAYGLEKSCQQAEDALSQGMEKLQQMLADSVGPGQLVEGTHIPQMDTAMERLEALVSFVNQADHLRQETLRQMYRILTTRQTGRFLLDLGEYFQRLRALSKLWANRPQELTKSVIKH

SEQ ID NO: 30603 - protein, 78 aa, Glycine max
  Clone ID: TF_GmC322_1.pep
HSSVAGVNARKRDKPLPPIVIDDPSDIVAMKRARNTLAARKSRERKAAKLEELEDKIAKLEAERDHWKRIALAQTGMQ

SEQ ID NO: 30604 - protein, 169 aa, Glycine max
  Clone ID: TF_jC-gmst024169c09b1.pep
HASGRDIQSAGGGGGGRQPSMGEMTLEDFLSRAGVAVDAAPHWMHQYPQQQQQYALPRPLPLPGPALDAAYHGDRPGVFLSHSQVAGRKRAATAAVAGDGVVERTVERRQKRMIKNRESAARSRARKQAYTNELENKVARLEEENKRLIELKVLKPLEPLEPPPAEQNK

SEQ ID NO: 30605 - protein, 159 aa, Glycine max
  Clone ID: TF_GmC137634_1.pep
APGGGVQSLSVQGGGIGGMVGLAPGSVHVATGSPAANQLSSGDRIGKSNGDTSSVSPVPYVFNGGLRGRKSGGAVEKVIERRQRRMIKNRESAARSRARKQAYTMELEAEVAKLKEENEELQKKQAEIMEIQKNQVKEMMNLQREVKRRRLRRTQTGPW

SEQ ID NO: 30606 - protein, 385 aa, Glycine max
  unsure (1)..(385): unsure at all Xaa locations
  Clone ID: TF_GmC1880_1.pep
MDNRDNKSPPPLPPSSSRYVKSEQQASLSASSSFSHDDISGMPENPPKNXGHRRAHSEIITLPDDLTFDVDLPDDNDLLSIYLQFDQLDSSPLPLPPPGSSNSIANNNNNNNNKNNNNNNERPTRVRHQHSLSMDGSIHPDMLLSATAAAADDVSGGGIDTKKAMSADKLAELALVDPKRAKRIWANRQSAARSKERKMRYISELERKVQTLQTEATSLSAQLTLLQRDTTGMTAENSELKLRLQTMEQQVHLQDALNDALKEEIQHLKALTGQVMPNGGPVNFASFGGGQQFYPNNQAMHTLLAAQKFQQLQIHSQKQHQLQQQQQFQQQQQFQQLQQLQLQQQQQLQLQQQQQQQQQQQQQQQQQQQQQQQLQLQQQQQQQEQ

SEQ ID NO: 30607 - protein, 196 aa, Glycine max
  Clone ID: TF_GmC299_5.pep
MQFHHYYYEVLSNRESARRSRRRKQAHLTELETQVSQLRSENSSLLKRFTDVSQKYNNAAVDNRVLKADVETLRTKVKMAEETVKRITGLNPMLHAITEMSSMAMPSFDESPSETSADAAVSVQEDPNHHRCQPTSNNGLGGISSIETVQQNVAAVVGGNKTGRTTSLHRVASLEHLQKRIRGGADSRGPPSNGEQ

SEQ ID NO: 30608 - protein, 227 aa, Glycine max
  Clone ID: TF_GmC1081_2.pep
QSGHFTARNKFQQEGDSGSLIMLKGDIGEKPRPIGIIWGGTANRGRLKLKVGQPPENWTSGVDLGRLLNLLELDLITTDEGLQVAVQEQRAVSATVIGSTVGDSSPPDGVLPKDKAEDKYEPLGLQIQSIPLGVVPSSQDMKPSIMETEFKLEDGIKVGPSIEHQFIPSFIGRSPLHKNSIQDRTATENLSSLRNNCDEDLCVSLQLGDNEAKRRRSEASTSTEEPQ

SEQ ID NO: 30609 - protein, 198 aa, Glycine max
  Clone ID: TF_GmC749653_1.pep
MVPSEIRGVHYLAPENPFLVPPNFSLLQSDIPNLHLNTLLSNFPNCHFPPSGHEFVVPPSSCLSSNSTSDEADEIQFNIIDERKHRRMISNRESARRSRMRKQKHLDELWSQVVRLRTENHNLIDKLNHVSESHDRVLQENARLKEEASALRQMLADMQIGTAFACTMEDLEDLPCNTSQLKPDPLNQSITPADMIHE

SEQ ID NO: 30610 - protein, 426 aa, Glycine max
  unsure (1)..(426): unsure at all Xaa locations
  Clone ID: TF_GmC1716_1.pep
MGNSEEEKSVKTGSPSSSPATTEQTNQPNIHVYPDWAAMQYYGPRVNIPPYFNSAVASGHAPHPYMWGPPQPMMQPYGPPYAAFYSHGGVYTHPAVAIGPHSHGQGVPSSPAAGTPSSVESPTKLSGNTDQGLMKKLKGFDGLAMSIGNCNAESAERGAENRQSQSVDTEGYSDGSDGNTAGANQTKRKRSREGTPTTDAEGKTELQNGPASKETASSKKIVSATPASVAGTLVGPVVSSGMATTLEXLRNPSTVHSKANSTSAPQPCAVVRNETWLQNERELKRERXRKQSNRESARRSRLRKQAETEELARKVEMLTAENVSLKSEITRLTEGSEQMRMENSALREKLINTQLGQREEITLSSIDSKRAAPVSTENLLSRVNNSGSNDRTAENENDICENKPNSGAKLHQLLDTNPRANAVAAG

SEQ ID NO: 30611 - protein, 168 aa, Glycine max
  Clone ID: TF_GmC306390_1.pep
MLSLPPSDPFSTFSAGFTPWDHDEDSHALFSPKPVSSSSGSDDKSEPNQHVSASSTAMEERKRRRMISNRESARRSRMRKQRHLENLRNQLNKCRVENRELSNRLQFVLHHLNRLRTENEWLHSERTLLRQKVANLTQILIFQQFQTFSPAWTCTNNNTSLMTINQVN

SEQ ID NO: 30612 - protein, 134 aa, Glycine max
  Clone ID: TF_GmC535_3.pep
TAARRRQKGKRMESNRESARRSRMKKQKLLEDLSDVASRLQGENVRLAQSIKAKEEAYVEIEAANDILRAQTMELADRLRFLNSILEIADEVGGGGESFEIPQIPDPLFMPWQIPHPMMASPDMLLHGNQGLFA

SEQ ID NO: 30613 - protein, 214 aa, Glycine max
  Clone ID: TF_GmC2191_3.pep
ARAANKPEGRENRTKGATSGSSEPGDEDDEAGACEQSTNPADMKRLRRKVSNRDSARRSRRRKQAQLSELELQVEKLKVENATLYKQFTDASQHFREADTNNRVLKSDVEALRAKVKLAEDMVTRSSFTTLNYQLLQTQQHQMSTPPQLNTTNLRRMAHVSPTITVHGNDASYNGVTVGEQNSSALGNLDMTFNNINNGVMNNAMSCGTIWPLD

SEQ ID NO: 30614 - protein, 160 aa, Glycine max
  Clone ID: TF_GmC1471_2.pep
MASSSGTSSGSSLLQNSGSEEDLQAVMDQRKRKRMISNRESARRSRMRKQKHLDDLVSQVAQLRKENQQILTSVNITTQQYLSVEAENSVLRAQVGELSHRLESLNEIVDVLNATTVAGFGAAATSSTFVEPINNNSFFNPLNMGYLNHPIMASADILQY

SEQ ID NO: 30615 - protein, 113 aa, Glycine max
  Clone ID: TF_GmC1471_4.pep
MASSSGTSSGSSLLQNSGSEEDLQAVMDQRKRKRMISNRESARRSRMRKQKHLDDLVSQVAQLRKENQQILTSVNITTQQYLSVEAENSVLRAQVGELSHRLESLNEIVDVLN

SEQ ID NO: 30616 - protein, 336 aa, Glycine max
  Clone ID: TF_GmC609_2.pep
MGTGEESTAKVPKPSSTSSIQIPLAPSYPDWSSSMQAYYAPGATPPAFFASNIASPTPHSYMWGSQHPLIPPYSTPVPYPAIYPPGNVYAHPSMAMTLSTTQNGTEFVGKGSDEKDRVSAKSSKAVSANNGSKAGDNGKASSGPRNDGTSQSAESGSEGSSDASDENTDQQESATNKKGSFDQMLVDGANARKNSVSTIPHSSVPGNPAVSMSPTSLNIGMDLWDASPAGAEAAKMRHNQSSASEAVTPPTIMGREVPLGEQWIQDDRELKKQKRKQSNRESARRSRLRKQAECEELQKRVESLRSENRTLREELQRVSEECKKLTSENDSIKVIQ

SEQ ID NO: 30617 - protein, 200 aa, Glycine max
  Clone ID: TF_GmC6779_2.pep
HASVKSGGWQDSFEDEPSQNGSLAYTAQNGGLNTPHTVVNQTMSIIPISAGGPTRPYGCEKTTEGIGMDYWGTPASSNIPALGRKVPSTAVAGGMVTVGSRDSAQSQLWLQDEREPKRQRRKQSNRESARRSRLRKQAECDELAQRAEALNEENASLRSEVNRIRSDYEQLVSENSPLKERLGELPANDDHHRSCRNDQH

SEQ ID NO: 30618 - protein, 330 aa, Glycine max
  Clone ID: TF_GmC1711_1.pep
MNQKFIGKPPATVDLDRMPERGSHHRRSHSDTSFRFAANFDDLLLFDPSDFDISGLPSPLPLPSPVSAGLVPMSVDSDESGKQPRPAGASAGGHLRSLSVDSDFFDGLGFGGDERGAGKGGGGERRVGHHRHSNSMDGSSTTSFEADSAMIMDGVKKAMAPDKLAELALMDPKRAKRILANRQSAARSKERKIRYTSELERKVQTLQTEATNLSAQLTMLQRDTTDLTTENKELKLRLEALEQEAQLREDLNEALKEELQRLRAQSTRLGAIGGNPSFGGIFNQLASQLAMQQLSNSAPHQQTQHQPQVGMPPPPSGQNHPNFMDFNQQK

SEQ ID NO: 30619 - protein, 489 aa, Glycine max
  Clone ID: TF_GmC726_1.pep
DARSENLVESLSAQERLGSPNLSPASSHSRSLSQPSFFSLDSLPPLSPSPYKEPSFSDSISTDVSAEESLPTSHAPLPNRGHALQLGHSLPPRKGHRRSNSDSPLGIADFIQSAPQYDTCGTWSYCENNAYRGGNSGFEKPIQLVLKEPIKDMDRVDGFGGEPMVGRKEDDALDDLFSAYMNLDNIDGLNFSGMEDKDLDSRTSGSKTVESSDNEVESHANGKVTGSQGASSRCSEERREGVKRSSNGDVAPGSRHRRSFSLDSSIGNFHIGDESPKLPPSQNRFGQHSPSSSIDGKTSETSMEFGNGEFSSEELKKIKENDKLAEIAMADPKRAKRILANRLSAARSKERKMRYISELELKVQTLQTETTTLSTQFTKLQMDNSELKSENNEYKLRIQALEQQSQLKDALNETLDAEVRRLRRTVAELGGESLLSSRMAQQLAISQQVFQLQHQQHPNQLRHVQLDNSHSQEQTQTQSQCHNGKATAY

SEQ ID NO: 30620 - protein, 150 aa, Glycine max
  Clone ID: TF_GmC463_1.pep
MASPIQQQQRSTTTSSGSEGGDPHIIDERKRKRMLSNRESARRSRMRKQKQLEDLTDEVSRLQSANKKLAENIEAKEEACVETEAANSILRAQTMELADRLRFLNSILEIAEEVEGLSVEIPEIPDPLLKPWQIPHPIQPIMATANMFLR

SEQ ID NO: 30621 - protein, 406 aa, Glycine max
  Clone ID: TF_1905784.pep
SSEWAFQRFLQEATAAGTSTSSPPQPPTMTASSSSSSHQNDVVEIKDENLSIPNLNPSTALNSKPASSFGLAPPPNIAVDSEEYQAFLKSQLHLACAAVALTRGKSLNPQDSGSTAHDKGSETASAAQSGSHVSTLGSGQEVAKIQDKDAGGPVGIPSLPPVQKKPVVQVRSTTSGSSREQSDDDEAEGEAETTQGMDPADAKRVRRMLSNRESARRSRRRKQAHLTELETQVSQLRVENSSLLKRLTDISQKYNEAAVDNRVLKADVETLRTKVKMAEETVKRVTGLNPLFQAMSEISSMVMPSYSGSPSDTSADAAVPVQDDPKHHYYQQPPNNLMPTHDPRIQNGMVDVPPIENVEQNPATAAVGGNKMGRTTSMQRVASLEHLQKRIRGEVSSCGTQGRGEQ

SEQ ID NO: 30622 - protein, 174 aa, Glycine max
  Clone ID: TF_6913416.pep
HQDALSNDSNSSTNYSSKYSPDYTDNIDNQSGIDRRSEDDVARHTAITPILKKNITKFYEPLVDNNTVYNYEDDPVEYKKARKRIQNRESASRVRSKKRNYVGDLEVEMNMIKKENADLKVKNAALKAENNLLKQQTCFLEKMIMKTGPQSITNTPANNVEQNQECLLPLVNKA

SEQ ID NO: 30623 - protein, 774 aa, Glycine max
  Clone ID: TF_GmC470_1.pep
MTESMPAVEPSPEPPASDIVFDDFSTDFSAFPIPSMDSLFNTTDGLPFPSDLEFGMDFNNNNGEFEITFDDLDDIYIPSDAEDFLLPDACNPNYASVSPPIDDSSAKNSDSDASAVSGDGVSRFFNSQVSESDSADNVRVPSVPSPEAEFCEREESSNGPVSSQGSGNGGSGVYEAMHSPSPDSGPYERDITSFHAHAATNNGVKMEEVPAFDLKRKKGSCEGSATKHRRFSSSVENNNNNTEKQSQSGLNGIDDEDEKRKARLMRNRESAQLSRQRKKHYVEELEEKVRSLNSIIADMSSKMSYVVAENATLRQQVGAAAGVMCPPPPAPAPGMYPHHPPMAPMPYPWMPCAPYVVKPQGSQVPLVPIPRLKPQQPASAPKSKKSESKKSEGKTKKVASISLLGLFFFIMLFGGLVPVVDFRFGGLVDNVPGTGSSNYVSDRVYGHGGGKVWSLNGPRNGSGRDGDVGFSNGRFSVSDRVKNYEKRGRNLREERHDRKGPDDSSRQGNASEPLVASLYVPRNDKMVKIDGNLIIHSIMASEKAMASQTAEAKKDKRETGLAIPKDLDSALAIPGVGRSRDQHPHVYRVSPEQRKALGSGSTKALKDHMKSSATDGKMQQWFREGLAGPMLSSGMCTEVFQFDASPSPGAIVPATSVANVSTENHQNATSVKKTRNRRTLHELPEPLNGSSLNITEEQVKNLQKDHFHGNKSSMVVSVLVDPREAGDGDVDVDGMMRPKSLSRIFVVVLIDSVKYVTYSCGLPRASPHLVTGYV

SEQ ID NO: 30624 - protein, 198 aa, Glycine max
  Clone ID: TF_GmC9561_1.pep
MDDILKSFSPKSVDDVWNDIVTGATVHDAVSATATDYADAAMTLEDFLTKAVTEEDVRGAPPPPPPPPPSSFLPFPADGSSSSVEPFANGVSAAPSNSVQKGKRRAVEEPVDKATLQKQRRMIKNRESAARSRERKQAYTSELEYLVHQLEQENVQLLNEEAEMRRQRKKQLFECIIPIEVMPKPKKKLRRVNSAQSL

SEQ ID NO: 30625 - protein, 232 aa, Glycine max
  Clone ID: TF_GmC299_4.pep
DPTREGLVGCDPPSEKGDIEGETSMNDNTDPADVKRVRRMLSNRESARRSRRRKQAHLTDLETQVSQLRGENSTLLKRLTDVSQKYSDSAVDNRVLKADVETLRAKVKMAEETVKRITGLNPMPHAMSDISSLGLPSFDGRSPSDTSADASVPVQDDPHHHFYQPTLNNPIPSHDPIVNNGLGGISSIENVQQQNAAAVVGGNKIGQTASLQRVASLEHLQKRIRGGPPSEQ

SEQ ID NO: 30626 - protein, 240 aa, Glycine max
  Clone ID: TF_GmC311753_1.pep
MDDGNAELSDKLSDNNVLFLNPESCSSFQASSSSRTCTHTHTCNPPGPDAAHTHTCYHTHTQVFAPEDDGRKHSNSKQKRPSGNREAVRKYREKKKAHTAYLEEEVKKLHMVNQQLVRKLQGQALLEAELARLRSILARLRGKIDSELGAWPFQKQYCNTSYIFKEGDAGLECQKNNLPCFHPHVGSSSQVNICACGKSMIPLDGNCQPEMVDCQVDANNMTSTEGQTVDNIMSSASQDG

SEQ ID NO: 30627 - protein, 214 aa, Glycine max
  Clone ID: TF_GmC128657_2.pep
MQTKEVVSSLSYLLPSNPCSYPPSNNYTSMIQNSIPTFQFQRFSNQIYGCNNSHNTTYQVPDFSPQSSCISSNSTSDEADDQNLSLINERKHRRMLSNRESARRSRMRKQKHLDELWSQVVWLRNENHQLIDKLNHVSETHDQVLQENSQLKEEASELRQMIRDMQIHSPCGGPNSFITPLEDHDVDHVPSAYLRSDDSSNQFNSCNNNMDLLG

SEQ ID NO: 30628 - protein, 301 aa, Glycine max
  Clone ID: TF_GmC299_2.pep
KLNLACAAVAMTRGSLVKSQNPDSGPQASNFSEVGSHATLKGSGPFGNDDPSKLQNKDIKAQIGIPSSPSMQNKSAVVAMRPTISGSSGEQSDDEEAEGEINMTGNMTPVDAKRVRRMLSNRESARRSRRRKQAHLTELETQVSQLRSENSSLLKRFTDVSQKYSNAAVDNRVLKADVETLRAKVKMAEETVKRITGLSPMLHAMTEMSSLGMPLFDESPSETSADAAVPVQEDPNHHLCQPTSNNGLGGISSIETVQQNVAAVVGGNKMGRTTSLHRVASLEHLQKRIRGGADSRGTPSN

SEQ ID NO: 30629 - protein, 222 aa, Glycine max
  Clone ID: TF_GmC6779_1.pep
FSQDSQLKSGGRQDSFEDEPSQNGSSAYTPQNGGLNIPHTVVNQTMSIIPISAGGAPGAVPGPTTNLNIGMDYWGTPGSSNIPGLGRKVPSTAVAGGMVTVGSRDSAQSQLWLQDERELKRQRRKQSNRESARRSRLRKQAECDELAQRAEALKEENASLRSEVNRIRSDYEQLLSENAALKERLGELPPNDDHHHRSGRNDQHVGNDTQQSGQTEAVQGGH

SEQ ID NO: 30630 - protein, 491 aa, Glycine max
  Clone ID: TF_GmC1611_2.pep
MASQRIGETGLSESGPSSHHVPYGVLHGISTSSGLINQGSAFDFGELEEAIVLQGIKIRNDEAKASALFTGRPSATLEMFPSWPMRFQQTSRGGSKSGGESTDSGSGVNTLSTKNELRFETESPISIKASPSDHHQAFDQHLQQQQQQQQQQQETATAGTSSQNQSAAKSPQEKRKGAGSTSEKPLDAKTLRRLAQNREAARKSRLRKKAYVQQLESSRLKLTHLEQDLQRARSQGVFMGCGGAGGSLTRGAAMFDMEYARWLEEDHRLMGELRNGLQAPLSDSDMRVMVDGYLSHYDEIFRRLGVAAKSDVFHLINGMWTSQAERCFLWIGGFRPSDLIMMLIQQLEPLAEQQIMGMYGLKHSSQQAEEALSQGLEQLQQSLVDTITGGPVVDGVQQMVVAMSKLANLEGFVRQADNLRQQTLHQLCRLLTVRQAARCFIVIGEYYGRLRALSSLWASRPRETLINDDNSCQTTTEMQIVQHSQNYFSSF

SEQ ID NO: 30631 - protein, 377 aa, Glycine max
  unsure (1)..(377): unsure at all Xaa locations
  Clone ID: TF_GmC1716_2.pep
MGNSEEEKSTKTEKPSSPVTMDQANQTNQTNIHVYPDWAAMQHIMGHHAYXGPHSHGQGVPSSPAAGTPSSVESPTKFSGNTNQGLVKKLKGFDELAMSIGNCNAESAERGAENRLSQSVDTEGSSDGSDGNTAGANQTKRKRSREGTPITDAEGKTELQNGPASKETASSKKIVSATPASVAGTLVGPVVSSGMATALELRNPSTVHSKANSTSAAQPCAVVRNETWLQNERELKRERRKQSNRESARRSRLRKQAETEELARKVEMLTAENVSLKSEITRLTEGSEQMRMENSALREKLINTQLGPREEITLSSIDSKRAAPVSTENLLSRVNNSGANDRPAENENDICETKPNSGAKLHQLLDTNPRANAVAAG

SEQ ID NO: 30632 - protein, 153 aa, Glycine max
  Clone ID: TF_GmC306557_1.pep
MSMSMASSSGNSSISTKSQSSGSEGDLQVVITDERKNKRKQSNRESARRSRMRKRNHLDQLTKQLSQLAKNNGEILATIDITTQHYLNVEAENSILRAQMGELSQRLQSLNDIVHDIIINTTTTYERDCYLTSAQNFTTTTYTLCLNQPVFQW

SEQ ID NO: 30633 - protein, 364 aa, Glycine max
  Clone ID: TF_GmC4292_1.pep
MQDPSSNPNSNPNPNPHNANAASQLPRPPQATASTAVAGAFSSSLFARSGGPHHRRAHSEMSFRLPDDMMDLSPSDPFAGGSSTASMEEIGSEDDLFSTYIDVDKLSGANGSGGAGNGADPTGEREKSPARPRHRQSSSVDFGEIMDAKKAMPPDKLAELWTIDPKRAKRILANRQSAARSKERKARYIQELERKVQTLQTEATTLSAQLTLYQRDTSGLSTENTELKLRLQAMEQQAQLRDALNEALKKEVERLKVATGEGMSHTESFNLGMHQMPFSGSNFIPIPPQSGPSGHQNMQMPPFGHSPSTMPTHQLHQTSSHPYSEILQNEQLGRFQGLDISSKGSTLVKSEGPSLSASESSSTF

SEQ ID NO: 30634 - protein, 233 aa, Glycine max
  unsure (1)..(233): unsure at all Xaa locations
  Clone ID: TF_GmC1521_7.pep
MPRRNVSLGNSASHASALPLFLFSGDMESKWGGAPASIMAANFDDFKWIASMFDPGNDDVKPFSDAAFQNQDAVTAFSTCGGVTDDTLVRSQNLTPIQSTISATIDSQSSFCGTVPVSANKPNVRDNQVKGVATTTSGSSREPSDEDDEAGPCEQSTNAIDMKRLRRKVSNRESARRSRRRKTAHLADLEWAVERLRLGNAXLFXQLTDASQQFRDADTNNRVLKSDVEALRA

SEQ ID NO: 30635 - protein, 395 aa, Glycine max
  unsure (1)..(395): unsure at all Xaa locations
  Clone ID: TF_GmC1716_3.pep
MGNSEEEKSTKTEKPSSPVTVDQANQTNQTNIHVYPDWAAMQAYYGPRVTMPPYYNSAVASGHAPHPYMWGPPQPMMPPYGPPYAAIYPHGGVYTHPAVPIGPHTHSQGVPSSPAAGTPLSIETPPKSSGNTDQGLMKKLKEFDHXGLAMSIGNGHAESAERGGENRLSQXDGEGKTEIQGSPISKETAASNKMLGVVPASVAGTIVGHVVSSGMTTALELRNPSSVHSKTSAPQPCPVLPAEAWVQNERELKRERRKQSNRESARRSRLRKQAETEELARKVESLNAENATLKSEINRLTESSEKMRVENATLRGKLKNAQLGQTQEITLKIIDSQRATXXVSTENLLSRVNNSGSNDRTVEDENGFCENKPNSGAKLHQLLDTSPRADAVAAG

SEQ ID NO: 30636 - protein, 224 aa, Glycine max
  Clone ID: TF_GmC1716_5.pep
DTEGSSDGSDGNTSGANQTRRKRSREGTPTTDGEGKTEMQGSPISKETAASNKMLAVVTAGVAGTIVGPVVSSGMTTTLELRNPSSVHSKASAPQPCPVLPAETWLQNERELKRERRKQSNRESARRSRLRKQAETEELARKVESLNAENATLKSEINRLTESSEKMRVENATLRGKLKNAQLRQTQEITLNIIDSQRATPISTENLLSRVNNNSGSNDRTVED

SEQ ID NO: 30637 - protein, 199 aa, Glycine max
  Clone ID: TF_GmC118795_1.pep
ARNPAIRLDEANNSLARNEPLLKRQQTLGEMTLEDFLVKAGVVQESSSLFKSSLLYQNQIGNIASNGPLSASYRFRHVIGTGSSVSCNGLETQNMLAQNNNLVIKDVTTNGAVEKCPSLGESSGKGNRKRIIDGPPEVVVERRQRRMLKNRESAARSRARRQAYTVELEAELNLLKEENEKLKQTLADAERKRKHEISQ

SEQ ID NO: 30638 - protein, 207 aa, Glycine max
  Clone ID: TF_LIB4200-004-Q1-K1-C12.pep
MGTQTMGTHGGGGDSNGKQSPLQPLVRQNSMYSLTLDEVQNQLGDLGKPLTSMNIDELLKNVWTAEASQTIGMDNEGTAQASQASLQRQASLSLTGALSKKTVDEVWRDIQQNKIVGEKKFQDRHPTLGEMTLEDFLVKAGVVADNQMAMPSSLMGTMSDTQTPGRKKSTSEDMIEKTVERRQKRMIKNRESAARSRARKQAYTYEL

SEQ ID NO: 30639 - protein, 139 aa, Glycine max
  Clone ID: TF_GmC4092_7.pep
QNNSGSKEELQALMEQRKRKRMISTRESARRSRMRKQKHLDDLASQVTQLRNENHQILTSVNLTTQKYLAVEAENSVLRAQVNELSHWLESLNEIIHFLNATDGGPPPPPSSFFEPDATFFNKAYLSQPIMASADMLQY

SEQ ID NO: 30640 - protein, 163 aa, Glycine max
  Clone ID: TF_GmC12723_1.pep
NSARASMSNILLQSSSSEEDLQLLMEQRKKKRKQSNRESARRSRMRKQKHLDDLIAQVDHLKKQKSLTLMKVDITTKHYLEVKAENSILWAQKTELTQSLQSLNDIIDLINTTNGVYHTDCYDINNHNNHNNYYNNNNNFMNPMHMAYLNQPIVATADNMFLW

SEQ ID NO: 30641 - protein, 160 aa, Glycine max
  Clone ID: TF_GmC1005_1.pep
MASSKVATTTTTTTNSDISSQQVWDGATMEMESQDNMNMSMSLQDLLTENDAVPPSHSHGRGKRKTLVEEPLVVDKVTLQKQRRMIKNRESAARSRERKQAYTVELESLVTHLEEENAILLKQEADRKRQRFNQLMECLIPVEEKRKPKPMLRRVNSSQW

SEQ ID NO: 30642 - protein, 132 aa, Glycine max
  Clone ID: TF_GmC295_1.pep
VCDLQVVVDERKKKRKQSNRESARRSRMRKRKHLDELTKQVSQLAKGNGEILGTIDITTQHYLNVEAENSILRAQMEELSQRLQSLNDIVDGIINLTNATTAYERDCYLTSAQNITTKNNTLCLNQQAVFQW

SEQ ID NO: 30643 - protein, 152 aa, Glycine max
  Clone ID: TF_GmC295_2.pep
MSMASSSGNSSISTKSQSSGSEGDLQVVVDERKKKRKQSNRESARRSRMRKRKHLDELTKQVSQLAKGNGEILGTIDITTQHYLNVEAENSILRAQMEELSQRLQSLNDIVDGIINLTNATTAYERDCYLTCAQNITTKNNTLCLNQQRFQW

SEQ ID NO: 30644 - protein, 323 aa, Glycine max
  Clone ID: TF_GmC153952_1.pep
MGTQTMGTHGGGGDSNGKQSPLQPLVRQNSMYSLTLDEVQNQLGDLGKPLTSMNIDELLKNVWTAEASQTIGMDNEGTAQASQASLQRQASLSLTGALSKKTVDEVWRDIQQNKIVGEKKFQDRHPTLGEMTLEDFLVKAGVVAGASSNRTNTSTIAGVDSNVAVPQFPSQAQWIQYPQAQYQHPPQSLMGMYMPSQGMVQPLHLGAGASLDVLFADNQMAMPSSLMGTMSDTQTPGRKKSTSEDMIEKTVERRQKRMIKNRESAARSRARKQAYTNELENKVSRLEKENERLRKRKELEQMLSCAPPPEPKYQLRRIASAPF

SEQ ID NO: 30645 - protein, 288 aa, Glycine max
  Clone ID: TF_GmC2191_2.pep
MAMTTTTESDLDYELRYLSLAVTDTFTAVQNLLPDAMTSFSACGLIDPLCSQNLTPKHSTITATIDSQSSICATSNVGSPVSANKPEGRENHTKGATSGSSEPSDEDDEAGACEQSTNPADMKRLRRKVSNRDSARRSRRRKQAQLSDLELQVEKLKVENATLYKQFTDASQHFREADTNNRVLKSDVEALRAKVKLAEDMVTRSSFTTLNNQLLQTQHHQMSTPQQLNTTNLRRMAHVSPTITVHGNDVSYNNGGQNSALGNLDMSFNDINEVMNDAMSCGTIWPLD

SEQ ID NO: 30646 - protein, 175 aa, Glycine max
  Clone ID: TF_GmC1471_1.pep
MVSCIESYIYHINMACSSGTSSGSLSLLQNSGSEEDLQAVMEDQRKRKRMISNRESARRSRMRKQKHLDDLVSQVAQLRKENQQILTSVNITTQQYLSVEAENSVLRAQVGEFSHRLESLNEIVDVLNATTVAGFGAAATSSTFVEPINNNSFFNPLNMGYLNHPIMASADILQY

SEQ ID NO: 30647 - protein, 166 aa, Glycine max
  Clone ID: TF_GmC1471_3.pep
MACSSGTSSGSLSLLQNSGSEEDLQAMMEDQRKRKRMISNRESARRSRMRKQKHLDDLVSQVAQLRKENQQILTSVNITTQQYLSVEAENSVLRAQVGELSHRLESLNEIVDVLNATTTVAGFGAAASSTFVEPMNNNNNSFFNFNPLNMGYLNQPIMASADILQY

SEQ ID NO: 30648 - protein, 195 aa, Glycine max
  Clone ID: TF_GmC726_3.pep
YQYLSETSMEFGNGEFSSEELKKIKENDKLAEIAMADPKRAKRILANRLSAARSKERKMRYISELELKVQTLQTETTTLSTQFTKLQMDNSELKSENNEYKLRIQALEQQSQLKDALNETLDAEVRRLRRTVAELGGESLLSSRMAQQLAISQQVFQLQHQQHPNQLRHVQLDNSHSQEQTQTQSQCHNGKATAY

SEQ ID NO: 30649 - protein, 170 aa, Glycine max
  Clone ID: TF_GmC143038_2.pep
MASWPPKPTEIFCVHAREKAMASSPCDCWPHLSPPSSIEHVWNDIKLDSLSNSPVDIDFNNNHSVSDSSFLNLTSTSSSVFHKHDHDHSLLSVSNTSFEASGSKKTTLLDQRHARIIKNRESAVRSRARKQAYRKGLEVEIARLTEENSRLKRQLKELQCCLSSSDNPPT

SEQ ID NO: 30650 - protein, 150 aa, Glycine max
  Clone ID: TF_GmC463_2.pep
MASSIQQQRSTATSSGSEGGGDPQMIDERKRKRMLSNRESARRSRMRKQKQLEDLTDEVSRLQGANKKLAENIKAKEEACVETETANSILRAQTMELADRLRFFNSILEIAEEVEGLSVEIPEIPDPLLKPWQIPHPIQPIMAPANMFLR

SEQ ID NO: 30651 - protein, 184 aa, Glycine max
  unsure (1)..(184): unsure at all Xaa locations
  Clone ID: TF_jC-gmro02910074b08a1.pep
MLSALTPSDPFSPFSPFSAGFTPWDDNDDSHALFSPKPVSASSSASDYKSEPNPTEHVCASSSVMMDERKRRRMISNRESARRSRMRKQRHLENLRNQLNKCRVENRELGNRLQFFLHHLNRLRTENEWLRSERTLLRQXVAIXTXXLIFQPIQTTFSLLHDHMHQQQHTLMTNPVYIYIYIIY

SEQ ID NO: 30652 - protein, 485 aa, Glycine max
  unsure (1)..(485): unsure at all Xaa locations
  Clone ID: TF_GmC1081_1.pep
MGENEEAMQRLHFLKQPLNMEQLSIPQFNPSQMRARQHHHQNQFDGGNSNKRAGIPPSHPHPIPPISPYSQIPVSRQHNNISPTPTHTRSLSQPSFFSLDSLPPLSPSPFRDSSSTSVSEAADVSMEDRDVSSHSLLPPSPFSRTLNNSNLPLPPRKAHRRSNSDIPFGFSTVLQSSPPLIPLRNPVSAKPAQLVKRETPWDRVVEHNTNTNNNNNVEGSGEKKSPEGEVVDDLFSAYMNLDSFDALNSSGTDDKNGGENRDDLDSRASGTKTNGGDSSDNSARXESGHGGSEKREGMKRSAGGEIAPTTRHYRSVSMDSFIGKLNFDEESPKLPPSPGQRSALMSPAGGIDGNSAAFSLEFGNGEFSGPELKKIMANEKLAEIALIDPKRAKRILANRQSAARSKERKMRYISELEHKVQTLQTEATTLSAQLTLLQRDSAGLTNQNSELKFRLQSMEQQAKLRDALNEALTAEVQRLKIATAD

SEQ ID NO: 30653 - protein, 213 aa, Glycine max
  Clone ID: TF_LIB4280-015-R1-K1-G1.pep
MGSRTTWRVVGVEDDKGAERGMPSFNSELPNSNSCYTEGNTIDSFRVSDFGAFDQSYHIEDAVDLSGNPVYNSLKVNSQTISPGSVHISSLGQLPISLEKSPLTNQTEPPHRLRLQKVQSSNPGTILVGNTDNWEESTMADASPRTDISTDGDTDDKNHPFDRNQALTAVSDSSDRSKDKSDQKTLRRLAQNREAARKSRLRKKAYVPQLESS

SEQ ID NO: 30654 - protein, 204 aa, Glycine max
  unsure (1)..(204): unsure at all Xaa locations
  Clone ID: TF_GmC6275_6.pep
MNSASPQFVSPRSMSVYDPIHQISMWGEGFKSNGNLSAAMPLIDEADMKFDSQSEDASHGILGEPNKYDQEASKPTDKIQRRLAQNREAARKSRLRKKAYVQQLESSRLKLMQLEQELERARQQGMYIGGGLDSNHLGFAGSVNSGITTFEMEYGHXXVNEQNRQITELRNALNAHIXGDVELRILVDGLMSPYAEMFPMKSAA

SEQ ID NO: 30655 - protein, 172 aa, Glycine max
  Clone ID: TF_GmC9762_1.pep
QTSAWLLLVEVEPIHLGKRSLQNSGSEGDRDIMEQRKRKRMLSNRESARRSRMRKQQHLEGLSAQLDQLKKENTQMNTNIGISTQLYLNVEAENAILRAQMEELSKRLNSLNEMISLINSTTTTNNCLMFDEAQETTTQLFNDCGFMDAWNYGIPLNQQIMAYADNDMLMMY

SEQ ID NO: 30656 - protein, 122 aa, Glycine max
  Clone ID: TF_GmC9762_2.pep
MASPGGSGTYSSGSSSLQNSGSEGDRDIMEQRKRKRMLSNRESARRSRMRKQQHLEGLSAQLDQLKKENTQMNTNIGISTQLYLNVEAENAILRAQMGELSKRLNSLNEMISFINSPTTTTA

SEQ ID NO: 30657 - protein, 321 aa, Glycine max
  Clone ID: TF_GmC1737_1.pep
MGSQGGAVQEPKTTTPLARQGSLYNLTLDEVHNQLGNLGKPLGSMNLDELLKSVWSAEAGGGGEASGWDFGVGDATNMPHGKAAASGSSLNPQGSLTLSRDLSRKTVDEVWKDMQLKKVTNRDKKIQERQATLGEMTLEDFLVKAGVVAEALPTKGGAMSGVDSNGAFSQHGHWLQYQPLPAATQLPNVRGGDGAAPAIQQPFQVGVNLVLDAAYSPLVRTIMGTLSDTQTPGRKRGASGVVVEKTVERRQKRMIKNRESAARSRARRQAYTQELEIKVSRLEEENERLRRLNEMERALPSVPPPEPKPKQQLRRTSSAIF

SEQ ID NO: 30658 - protein, 191 aa, Glycine max
  Clone ID: TF_GmC11345_1.pep
SIRQRKVGENNKQLPKRQPHPLKVNLKHSQRQVQNKDQHPQHPPRLFPMRVNVTFVSAPTHLLNNAHVTASPGSKISPDVITRSNNVDNSPISPHYVINRGRKFSAIEKVVERRQRRMIKNRESAASSRARKQAYTFELEAEVAKLKELNRELQRKQEEIMEMQKNKDLDPACRPRVSKIHCLRRTLTGPW

SEQ ID NO: 30659 - protein, 341 aa, Glycine max
  unsure (1)..(341): unsure at all Xaa locations
  Clone ID: TF_GmC858_1.pep
MAQLPPKIXNMTPNWPDFSSPHQKNPFLXTTSSNQNPQWVKEFLESSLGGRGAPRRPVSDSVTFLEAPLLDHLLGKGGGVVGGGGGNKECERVYDVQFLSMFIDEAXGNNNNNNTMMAHTLSSSYPSTPPDHNSINDEKEMENKEEEEKKQVQHETDDEDKSECKHEITQLPNTNDTNNTTTKRVKRILANSNANATCSSEKITDPKRVKRILANRQSAQRSRVRKLQYISELERSVTSLQAEVSVLSPRVAFLDHQRLLLNVDNSALKQRIAALAQDKIFKDAHQEALKREIERLRQVYHQQNIKKMDNAAGSPPSQSPPSPSPKPRCETHTEKEQLINV

SEQ ID NO: 30660 - protein, 274 aa, Glycine max
  unsure (1)..(274): unsure at all Xaa locations
  Clone ID: TF_GmC16145_1.pep
VLSGLNLGVSLEIDDGELFFSKHEVVSSPNMGKHPCSGSMDSFFDELIKDTHACTHTHTCNPPGPDFSHTHTCYHVHTKIVPAPEEDHVATDDTAESAEKKSSSSKKRSLGNKEAVRKYREKKKARAASLEDEVVKLRALNQHLMKKLKGQAALEAEIARLKCLLVDIRGRIEGEIGSFPYXVAGSYVMNPCNLPCDDRVDCLHPDGRIGETAALNGEEFDGCEFENLQCLASQNLGLKDLRACGVGVGHTGSNVNSSALSKKRKGGSRAATAG

SEQ ID NO: 30661 - protein, 272 aa, Glycine max
  Clone ID: TF_GmC16145_2.pep
MDDGELDFSNHEVFSSPNMGELPSSGSMDSFFDELLKDTHACTHTHTCNPPGPDFSHTHTCYHVHTKIVPAPEEDHVATDDTAESAEKKSSSSKKRSLGNKEAVRKYREKKKARAASLEDEVVKLRALNQHLMKKLKGQAALEAEIARLKCLLVDIRGRIEGEIGSFPYQKPTPNANPPVANLPGSYVMNPCNLQCDDRVYCHHPDGRIGETAALNGEEFDGCEFENLQCLASQNLGLKDLRACGVGVGHTGSNVNSSALSKKRKGGTPFMP

SEQ ID NO: 30662 - protein, 110 aa, Glycine max
  Clone ID: TF_LIB4391-035-R1-K1-D6.pep
NNHVLLHLVIVDTDQHTQQRQNQQQHVMVVDGGTSQVAYSSHYPTACMAASATPAVAAPSPSDAPAGLCTSAHQLDYHQAQNVHHQQLKHQQQHVQMFIGQPYCTKLTEQ

SEQ ID NO: 30663 - protein, 299 aa, Glycine max
  Clone ID: TF_GmC6781_2.pep
MKKALPTNGKIAKDAKETVQECLSEFLRSTFQTHVLRWMDYIQHKQEFVGLFEKILLQKPGFEPPVTHPAGVVEADLKSNNTEQSVKNVWVSEVNSSKDKNKAEGKATGGKSTGDKEPTKAKAKPADKEVAEKENEVSVSLLNIQVGLIRKAWKHPSADSLLVEEIDVGEDKVRQVVSGLAKYCNPDELTNRRVVLITNVKPGKLRDVMSQGLVLCASDEGPTIVEPLLPPEGSQIGERISFSGIDGKPEDVLNPKKKQLDKITPHLFTDDKGVATYKGIPFMTSGGPCTSSIPRATIK

SEQ ID NO: 30664 - protein, 89 aa, Glycine max
  Clone ID: TF_LIB3242-495-P1-J1-F3.pep
FISFITSEASDKCEREKRKTINGDDLLWAMATLGFEDYIDPLKIYLTRYREMEGDTKGLAKGGDSSSKKDVQPSPNAQVECTHECANHA

SEQ ID NO: 30665 - protein, 327 aa, Glycine max
  unsure (1)..(327): unsure at all Xaa locations
  Clone ID: TF_GmC17763_1.pep
MGSQDNNVELSSNSFLAYKSAKVFVAGHRGLVGSAIGRKLTQLGFTNLVLRSHAELDLTRQSDVEAFFAYEKPEFVIVAAAKVGGIHANNTYPADFIAINLQIQTNVIDSAYRNGAKKLLFLGSSCIYPKFAPQPXIPEDALLTGPLEPTNEWYAIAKIAGIEMCQAYRIQHKWDAISGMPTNLYGPYDNFHPENSHVLPALMRRFHEAKVNGAKEVVVWGTGSPLREFLHVDDLADAVVFMMEKYSGLEHLNVGSGKEVTIKELAELMKEVVGFEGDLVWDSTKPDGTPRKLMDSSKLASLGWTPKVSLKDGLADTYKWYLENVNL

SEQ ID NO: 30666 - protein, 103 aa, Glycine max
  unsure (1)..(103): unsure at all Xaa locations
  Clone ID: TF_jC-gmro02910071g08a1.pep
SLPGEDCGSWNHTEENKRRTLQKNDIAAAITRTDIFDFLVDIVPREDLKDEVLASIPRGTMPVAGPADALXYCYMPPQHASKVELLVYYGVACDGPNMYAQQS

SEQ ID NO: 30667 - protein, 156 aa, Glycine max
  Clone ID: TF_GmC78471_1.pep
MRKKLDTRFPAARIKKIMQADEDVGKIAMAVPLLVSKALELFLQDLCDQTYEITLRRGAKTMNAFHLKQCVQTFNVFDFLKDIVSKVPDLGSSVATGDDHAVTKRRKVAGDDDNDSDEELKRNKKPEPGHSSGRGRGRGRGRGIRTVDQEIGFTCP

SEQ ID NO: 30668 - protein, 170 aa, Glycine max
  Clone ID: TF_GmC240_1.pep
RVVARTEEEESGVSIQLEFPKGRVKKIMALDKDVKRVSSEALFLVSRSTELFLQFLAEKSAQVAIEKKRKTVNLEHIREAVKRHQPTRDFLLDELPPPSQPTKPDRPTQPAGRPKLDPPPRGTRRIDLFFRKPELDNPAQAQPPENPAQAQPPENPDQDQAQSPVPVDES

SEQ ID NO: 30669 - protein, 215 aa, Glycine max
  unsure (1)..(215): unsure at all Xaa locations
  Clone ID: TF_GmC1633_1.pep
MLATGTPDVTYPSAHQAQDDQQRYPQQQVQMFXSNQMQQNEQTNDHKNHSLPLAQIQKIVQADEDIRMISAEAPVIFAKACEMFILELTLRSWIHTEENKRRTLQKNDIAAAISRNDVFDFLVDIIPRDELKEEGLGITKATIPLVNSPADMPYYYVPPQHPVVGPPGMIMGKPVGAEQATLYSTQQPRPPMAFMPWPHTQPQQQQPPQHQQTDS

SEQ ID NO: 30670 - protein, 156 aa, Glycine max
  Clone ID: TF_GmC1000_1.pep
MEPMDIVGKAKEDASLPKATMTKIIKEMLPPDVRVARDAQDLLIECCVEFINLVSSESNEVCNKEERRTIAPEHVLKALGVLGFGEYIEEVYAAYEQHKLETMQDSLKGAKWSNRAEMTEEEALAEQQRMFAEARARMNGGAIQSKEPEADQSLES

SEQ ID NO: 30671 - protein, 120 aa, Glycine max
  Clone ID: TF_GmC1000_2.pep
MEPMDIVGKAKEDASLPKATMTKIIKEMLPPDVRVARDAQDLLIECCVEFINLVSSESNEVCNKEERRTIAPEHVLKALGVLGFGEYIEEVYAAYEQHKLETMVIMLMTNVHDIYYNLTA

SEQ ID NO: 30672 - protein, 156 aa, Glycine max
  Clone ID: TF_GmC1000_3.pep
MEPMDIVGKAKEDASLPKATMTKIIKEMLPPDVRVARDAQDLLIECCVEFINLVSSESNEVCNKEERRTIAPEHVLKALGVLGFGEYIEEVYAAYEQHKLETMQDSLKGAKWSNRAEMTEEEALAEQQRMFAEARARMNGGAITSKQPDAHQSLES

SEQ ID NO: 30673 - protein, 156 aa, Glycine max; identical to SEQ ID NO: 30670
  Clone ID: TF_GmC1000_4.pep

SEQ ID NO: 30674 - protein, 121 aa, Glycine max
  unsure (1)..(121): unsure at all Xaa locations
  Clone ID: TF_7924671.pep
KPIDIXGKAKEDASLPKATITKIIKEILPPNIHITRDTQDLLIKYYIKFINLISSESNKVYNKEEKRTITPKHIXRTVKILKFSEYIREGDTAYEQHKVKTMQHSXKDAEKNNRPEXTEEE

SEQ ID NO: 30675 - protein, 144 aa, Glycine max
  Clone ID: TF_GmC275948_1.pep
MTGKRNQITTSPVGSPTSGNISDSSSSKEQDRFLPIANVSRIMKRALPANAKISKEAKETVQECVSEFISFITGEASDKCQREKRKTINGDDLLWAMTTLGFENYVGPLKFYLNNYRETEGEKSSMAKQEEHSPTHQTNIDGGG

SEQ ID NO: 30676 - protein, 218 aa, Glycine max
  Clone ID: TF_GmC720_1.pep
MSPRVRPRLREETEGGETVIINSYIISLSHVFFALAPPLPSTTTIFDSAFSDSSFVVTGRIMEPMDIVGKSKEDASLPKATMTKIIKEMLPPDVRVARDAQDLLIECCVEFINLVSSESNEVCNREDKRTIAPEHVLKALQVLGFGEYVEEVYAAYEQHKLETMQDSLRGGGKWSNGAEMTEEEALAEQQRMFAEARARMNGGAIASKQPDADQSLDS

SEQ ID NO: 30677 - protein, 105 aa, Glycine max
  Clone ID: TF_700872266_FLI.pep
FLEFCRASDKCQREKRKTINGDDLLWAMATLGFEDYMDPLKIYLTRYREMEGDTKGSAKGGDSSAKRDVQPSPNAQLAHQGSFSQNVTYPNSQGRHMMVPMQGPE

SEQ ID NO: 30678 - protein, 168 aa, Glycine max
  Clone ID: TF_GmC7912_1.pep
MAGVREQDQYMPIANVIRIMRRILPAHAKISDDAKETIQECVSEYISFITAEANERCQREQRKTVTAEDVLWAMEKLGFDNYAHPLSLYLHRYRESEGEPASVRRASSAMGINNNMVHPPYINSHGFGMFDFDPSSQGFYRDDHNAASGSGGFVAPFDPYANIKRDAL

SEQ ID NO: 30679 - protein, 223 aa, Glycine max
  Clone ID: TF_GmC1642_1.pep
METGGFHGYRKLPNTTSGLKLSVSDMNMNMRQQQVASSDQNCSNHSAAGEENECTVREQDRFMPIANVIRIMRKILPPHAKISDDAKETIQECVSEYISFITGEANERCQREQRKTITAEDVLWAMSKLGFDDYIEPLTMYLHRYRELEGDRTSMRGEPLGKRTVEYATLATAFVPPPFHHHNGYFGAAMPMGTYVRETPPNAASSHHHHGISNAHEPNARSI

SEQ ID NO: 30680 - protein, 226 aa, Glycine max
  Clone ID: TF_GmC1642_3.pep
METGGFHGYRKLPNTTAGLKLSVSDMNMRQQVASSDHSAATGEENECTVREQDRFMPIANVIRIMRKILPPHAKISDDAKETIQECVSEYISFITGEANERCQREQRKTITAEDVLWAMSKLGFDDYIEPLTMYLHRYRELEGDRTSMRGEPLGKRTVEYATLGVATAFVPPPYHHHNGYFGAAMPMGTYVREAPPNTASSHHHHHHHHHHARGISNAHEPNARSI

SEQ ID NO: 30681 - protein, 147 aa, Glycine max
  Clone ID: TF_GmC885568_1.pep
MGDNNIGKVLEREGFKYNFTAAASDTSAQDEVIKEQDRLLPIANVGRIMKQILPPNAKISKEAKETMQECVSEFISFVTGEASDKCHKEKRKTVNGDDICWALATLGFDDYSEPLKRYLHKYREFEGERANQNKGNNNTYENNIANI

SEQ ID NO: 30682 - protein, 271 aa, Glycine max
  Clone ID: TF_GmC1633_3.pep
MDKSEQTQQQQQQQQHVMGVAAGASQMAYSSHYPTASMVASGTPAVTAPSPTQAPAAFSSSAHQLAYQQAQHFHHQQQQHQQQQLQMFWSNQMQEIEQTIDFKNHSLPLARIKKIMKADEDVRMISAEAPVIFAKACEMFILELTLRSWIHTEENKRRTLQKNDIAAAISRNDVFDFLVDIIPRDELKEEGLGITKATIPLVGSPADMPYYYVPPQHPVVGPPGMIMGKPIGAEQATLYSTQQPRPPVAFMPWPHTQPLQQQPPQHQQTDS

SEQ ID NO: 30683 - protein, 185 aa, Glycine max
  Clone ID: TF_GmC1633_5.pep
MGWALPQVLAKWPILLTTRLLPWCSGTPAVAVPSPTQAPAAFSSSAHQLAYQQAQHFHHQQQQHQQQQLQMFWSNQMQEIEQTIDFKNHSLPLARIKKIMKADEDVRMISAEAPVIFAKACEMFILELTLRSWIHTEENKRRTLQKNDIAAAISRNDVFDFLVDIIPRDELKEEGLGITKATIAL

SEQ ID NO: 30684 - protein, 260 aa, Glycine max
  Clone ID: TF_GmC343_1.pep
MDHQGHSQNPSMGVVGSGAQLAYGSNPYQPGQITGPPGSVVTSVGTIQSTGQPAGAQLGQHQLAYQHIHQQQQHQLQQQLQQFWSSQYQEIEKVTDFKNHSLPLARIKKIMKADEDVRMISAEAPVIFARACEMFILELTLRSWNHTEENKRRTLQKNDIAAAITRTDIFDFLVDIVPREDLKDEVLASIPRGTMPVAGPADALPYCYMPPQHPSQVGAAGVIMGKPVMDPNMYAQQSHPYMAPQMWPQPPDQRQSSPEH

SEQ ID NO: 30685 - protein, 242 aa, Glycine max
  Clone ID: TF_GmC343_2.pep
MDHQGHSQNPSMGVVGSGAQLAYGSNPYQPGQITGPPGSVVTSVGTIQSTPAGAQLGQHQLAYQHIHQQQQHQLQQQLQQFWSNQYQEIEKVTDFKNHSLPLARIKKIMKADEDVRMISAEAPVIFARACEMFILELTLRSWNHTEENKRRTLQKNDIAAAITRTDIFDFLVDIVPREDLKDEVLASIPRGTMPVAGPADALPYCYMPPQHASQVGAAGVIMGKPVMDPNMYAQQSHPYMAP

SEQ ID NO: 30686 - protein, 201 aa, Glycine max
  unsure (1)..(201): unsure at all Xaa locations
  Clone ID: TF_LIB4199-001-Q1-K1-E11.pep
MGVATGASQMAYSSHYPTAPMVASGTPAVAVPSPTQAPAAFSSSAHQLAYQQAQHFHHQQQQHQQQQLQMFWSNQMQEIEQTIDFKNHSLPLARIKKIMKADEDVRMISAEAPVIFAKACEMFILELTLRSWIHTEENKRRTLQKNDIAAAISRNDVFDFLVDIIPRDELKEEGLGITKATIPLVNSXADMPYYYVPXQHP

SEQ ID NO: 30687 - protein, 435 aa, Glycine max
  unsure (1)..(435): unsure at all Xaa locations
  Clone ID: TF_GmC89_1.pep
LQKMLSEMQEVTELHPVPDAHVPVVKFKFNGVSVDLLYARLALWVIPEDLDISQESILQSVDEQTVLSLNGCRVTDQVLRLVPNIQTFRTTLRCMRFWAKRRGVYSNVAGFLGGINLALLVARICQLYPNALPDMLVSRFFRVYTQWRWPNPVMLCAIEEGSLGLPVWDPRRNPKDRYHLMPIITPVYPCMNSTYNVTSSTLRVMSDEFRRGSEICEAMEASKADWDTLFEPYXFFESYKNYLQIDITAENADDLRQWKGWVESRLRQLTLKIERHTYGMLQCHPHPGEFSDNSRPFHHCYFMGLQRKQGVPVNEGEQFDIRLTVEEFKHSVNAYTLWKPGMNIHVSHVKRSNIPNYIFPGGVRPTFPSKVTAENKQSSKSRASGHGQTEKPQGGKAVAVGADDVRKRKRSEDNMDNNPRNSSSPVSLAPPSREV

SEQ ID NO: 30688 - protein, 177 aa, Glycine max
  Clone ID: TF_GmC1427_1.pep
MAESDNESGGHTGNASGSNELSGCREQDRFLPIANVSRIMKKALPANAKISKEAKETVQECVSEFISFITGEASDKCQKEKRKTINGDDLLWAMTTLGFEDYVDPLKIYLHKYREMEGEKTAMMGRPHERDEGYGHGHGHATPMMTMMMGHQPQHQHQHQHQGHVYGSGSASSARTR

SEQ ID NO: 30689 - protein, 171 aa, Glycine max
  Clone ID: TF_GmC1427_5.pep
MAESDNESGGHTGNASGSNEFSGCREQDRFLPIANVSRIMKKALPANAKISKEAKETVQECVSEFISFITGEASDKCQKEKRKTINGDDLLWAMTTLGFEEYVEPLKVYLHKYRELEGEKTAMMGRPHERDEGYGHATPMMIMMGHQQQQHQGHVYGSGTTTGSAFFARTR

SEQ ID NO: 30690 - protein, 192 aa, Glycine max
  unsure (1)..(192): unsure at all Xaa locations
  Clone ID: TF_GmC1427_2.pep
MADSDNDSGGAHNGGKGSEMSPREQDRFLPIANVSRIMKKALPANAKISKDAKETVQEVRVKVSSAFITGEXADKCQREKRKTINGDDLLWAMTTLGFEDYVEPLKGYLQRFREMEGEKTVAARDKDAPPLTNATNSAYESANYAAAAAVPGGIMMHQGHVYGSAGFHQVAGGAIKGGPAYPGPGSNAGRPR

SEQ ID NO: 30691 - protein, 229 aa, Glycine max
  Clone ID: TF_GmC18981_1.pep
METNNQQQQQQGAQAQSGPYPVAGAGGSAGAGAGAPPPFQHLLQQQQQQLQMFWSYQRQEIEHVNDFKNHQLPLARIKKIMKADEDVRMISAEAPILFAKACELFILELTIRSWLHAEENKRRTLQKNDIAAAITRTDIFDFLVDIVPRDEIKDDAALVGATASGVPYYYPPIGQPAGMMIGRPAVDPATGVYVQPPSQAWQSVWQSAAEDASYGTGGAGAQRSLDGQS

SEQ ID NO: 30692 - protein, 161 aa, Glycine max
  Clone ID: TF_GmC1163_1.pep
MSEAEELPRSIVRRVVKDKLSRCSEDGEISVSKDALLAFSESGRIFIHYLSATANDICKESKRQIINVEDVFKALEETEFPEFLRPLKASLEEFRKKNAGKKAAVSKGKDDEPRKKRKLEGESPDKGEGSDKAELSDKGEDPDKGESDKGESGDETNDLKE

SEQ ID NO: 30693 - protein, 220 aa, Glycine max
  unsure (1)..(220): unsure at all Xaa locations
  Clone ID: TF_GmC18981_3.pep
RVRGAQAQSGPYPGGAGGSAGAGAGAGAGAAPFQHLLQQQQQQLQMFWSYQRQEIEHVNDFKNHQLPLARIKKIMKADEDVRMISAEGPILFAKACELFILELTIRSWLHADENKRRTPQKNDIXAAITRTDIFDFLVDIVPRDETKDPPALVGATASGVPYYYPPNGQPAGMMIGRPAVDPATGVYVQPPSQAWQSVWQSAAEDTPYGTGAQGNLDGQS

SEQ ID NO: 30694 - protein, 106 aa, Glycine max
  unsure (1)..(106): unsure at all Xaa locations
  Clone ID: TF_LIB4127-338-Q1-J1-B8.pep
AASQSGDSSLLPLLFRVEPMDIVGKAKEDASLPKATMTKIIKEMLPRGGRVDRDAQDLXTSXCVEVINLDWSEGNEVCRKEERRTIAPEHLLKASRALEFGEYIRE

SEQ ID NO: 30695 - protein, 61 aa, Glycine max
  Clone ID: TF_LIB4281-017-R1-K1-D6.pep
MSDAPPSPTHESGGEQSPRGSSSVARQQDRDLPIANIRRIMKKALPPNGGIGEDARDTVQE

SEQ ID NO: 30696 - protein, 58 aa, Glycine max
  unsure (1)..(58): unsure at all Xaa locations
  Clone ID: TF_LIB4127-338-Q1-N1-B8.pep
MRAPAAGRVARDAQDVWSECCPRLVSLVASESNEVCDQEQRRTXIAPVHVLKALWGLG

SEQ ID NO: 30697 - protein, 143 aa, Glycine max
  Clone ID: TF_GmC18981_4.pep
MENNQQQGAQAQSGPYPGGAGGSAGAGAGAGAAPFQHLLQQQQQQLQMFWSYQRQEIEHVNDFKNHQLPLARIKKIMKADEDVRMISAEAPILFAKACELFILELTIRSWLHADENKRRTLQKNDIGGGITRAEILGLVGGVG

SEQ ID NO: 30698 - protein, 113 aa, Glycine max
  Clone ID: TF_GmC718702_1.pep
MRQAGAYSGLLCGGVSGRTGPHSLPLARIKKIMKNSGEDVKMISGEAPIIFSKACELFIEELTRRSWIMAIQGKRRTLHKEDLASAVIATDIFDFLITLVSSSESHAVGGATN

SEQ ID NO: 30699 - protein, 127 aa, Glycine max
  Clone ID: TF_jC-gmXLIB3563P059cd04a1.pep
MDKSEQTQQQHQHGMGVATGASQMAYSSHYPTAPMVASGTPAVAVPSPTQAPAAFSSSAHQLAYQQAQHFHHQQQQHQQQQLQMFWSNQMQEIEQTIDFKNHSLPLARIKKIMKADEDVRMISAEAP

SEQ ID NO: 30700 - protein, 173 aa, Glycine max
  Clone ID: TF_GmC49_1.pep
MSDAPPSPTHESGGEQSPRGSSSGAREQDRYLPIANISRIMKKALPPNGKIAKDAKDTMQECVSEFISFITSEASEKCQKEKRKTINGDDLLWAMATLGFEDYIEPLKVYLARYREAEGDTKGSARSGDGSATPDQVGLAGQNSQLVHQGSLNYIGLQVQPQHLVMPSMQSHE

SEQ ID NO: 30701 - protein, 174 aa, Glycine max
  Clone ID: TF_GmC49_2.pep
MSDAPASPSHESGGEQSPRGSLSGAAREQDRYLPIANISRIMKKALPPNGKIAKDAKDTMQECVSEFISFITSEASEKCQKEKRKTINGDDLLWAMATLGFEDYIEPLKVYLARYREAEGDTKGSARSGDGSARPDQVGLAGQNAQLVHQGPLMHIVLQVQPQHLVMPSMQGHE

SEQ ID NO: 30702 - protein, 76 aa, Glycine max
  Clone ID: TF_LIB3167-011-P1-K1-B5.pep
MSYAPPSPPHENLGHHSPHGSSSSSSYHDQNLTISNICRIMKNAMSPNLKIANDSKDTVHEFCTHFIYFITNEAIY

SEQ ID NO: 30703 - protein, 171 aa, Glycine max
  Clone ID: TF_GmC6781_1.pep
MADGPASPGGGSHESGDHSPRSNVREQDRYLPIANISRIMKKALPANGKIAKDAKETVQECVSEFISFITSEASDKCQREKRKTINGDDLLWAMATLGFEDYMDPLKIYLTRYREMEGDTKGSAKGGDSSAKRDVQPSPNAQLAHQGSFSQNVTYPNSQGRHMMVPMQGPE

SEQ ID NO: 30704 - protein, 274 aa, Glycine max
  Clone ID: TF_GmC140739_1.pep
ETVKTESDASSTISSESGSIGCVNNANLAKRKTTQNNSSGSSQWTLLDLYSGCGAMSTGLCLGASLAGIKLVTMWAVDINAHACKSLKLNHPETHVRNEPAEDFLNLIKAWAKLCEEFALLGSERSDSDPDMDEDENEAVRKEESGNQSDSEEFEVEKLLAVCYGDPNDVKKPGLYFKVRWLGYASSYDTWEPIEGLSDCKEAMKDFVTKGYKKRLLPLPGDANFICGGPPCQGVSGFNRFRNAAAPLEDTKNKQLLVYMDIIDFLKPKYVLME

SEQ ID NO: 30705 - protein, 203 aa, Glycine max
  unsure (1)..(203): unsure at all Xaa locations
  Clone ID: TF_LIB4281-035-R1-K1-H4.pep
TQRPDLFAKKIRDNSAKVERIERSDAKENLCQACGENENLVSCGTCTYAYHPRCLLPPLKGPLPDNWRCPECVSPLNDIDKILDCEMRPTTAADNEATKLGSKQIFVKQYLGKWKGLSYLHCTWVPEKEFLKAFKTHPXLKTKVNNFHQKMASVNTSDEDFVAIRPEWTTXDRILACRGDDDEREYLVKWKELPYDECYWEFE

SEQ ID NO: 30706 - protein, 97 aa, Glycine max
  unsure (1)..(97): unsure at all Xaa locations
  Clone ID: TF_8827924.pep
EGSKMHLVFHISLLKKAVKPTCSRQLLPTAVNENWELQVQPEKVMQSITXEDGRKEVLIKWRGLPHHEDSWELADEMQAVFPQLDLENKVHLEGRGY

SEQ ID NO: 30707 - protein, 177 aa, Glycine max
  unsure (1)..(177): unsure at all Xaa locations
  Clone ID: TF_15286908.pep
IPSRLEEVNKLIIARDGLLATLRENLXSLKISCEQXTNKRRRDIEYVVGDXVFLKMQPYRRRSLAKRINEKLSPRFYAPFQVFNKVGTIAYKLDLPSHIKIHPVFHVSLLKKASPNXLPPMLSEDWKLQTYSDSVLDSRELQPGNVKVLIQWKNLPPSENSWESVAKLQEIFSIYHL

SEQ ID NO: 30708 - protein, 144 aa, Glycine max
  Clone ID: TF_13789341.pep
EFGTRLKLRPHRQSSAKGPEPITGKLSKRFFGPFQVVERVGKGAYRLQLPVDAKLHPVFHCSLLKPFQGNPPDTAAPLPPTLFDHQSVIAPLVILATRTVNDDDIEVLVQWQGLSPDDATWEKWTELCKEFHLEDKVLPHGPVE

SEQ ID NO: 30709 - protein, 249 aa, Glycine max
  Clone ID: TF_LIB4167-004-Q1-K1-G11.pep
GPELPLRPTRPGGAAVAQGGRQGFPVLGENFFEVQAIRRKRVRKGQVQYLIKWNGWPETANTWEPPENLESVPDVVEAFEESLKSGKHRKRKRKHVVHHTQPKKRLERSTTPYSLRRFSTGTAENHTQSAPPLIDPSLPNIPAFPRTVLFSDDVGNGAEGSSLRKATPSNANRSANGSEPNIKRTEENDYDPVLSELKTMTANGNDTDRLAIRIPEAKGSGPSGSNDQMDAKSKGVSMENKCSGRCRSK

SEQ ID NO: 30710 - protein, 464 aa, Glycine max
  Clone ID: TF_GmC149_1.pep
MKGGGGKRKASTSEAPNDVVVVVAAASAPSDDADLGVGDVGGVKVQNFEGNEGTQLRNTEEQEEEPHHVEGDEGGEDEEDYAEGEEEYEEENGGAVAGGQQGFPALGENFFEVEAIRRKRLRKGEVQYLIKWNGWPETANTWEPLENLESVPDVVEAFEESLKSGKHRKRKRKHVVHHTQPKKRLERSTTPYSLRRFSTSTAENHTQSAPPLNDPSLPDIPAFPHTVLFSDDVGNGAEGSSLRKATPSNANRSANGSEQNIKRNEENDYDPVLSELKAMTSNGNDADRLAIRIPEAKGSGPSGSNGQMDAKSKGACMETSESDRCRGSKRRKCGSVKRFKKELYANEPANAENPVSMPVGTAEPERTRDAGSGGNTNHARPASNIVNIVKPVGYSASVASGMQDVLVTFVASKSDGTEVMVDNKYLKAFNPLLVVPYTFTLLHLIIGCIIFLVPHLLRISVFSP

SEQ ID NO: 30711 - protein, 296 aa, Glycine max
  Clone ID: TF_GmC69_1.pep
MKKRSSSSSSSSVFEANGVEEPQQPSSCAAAALDELHKEKNENGEETLVPSNPYPNLDDGFYEIETIRRKRLRKGQLQYLIKWRGWPETANTWEPLENLQSVPDLVDAFEDSLKSGKHQKRKRKHVDVLQLTLLKKRSERSTTSYSLRHFPPLTPTNANDYDPKLSELKAPTHTGVQLDNLAIHFQQPIPSRGAKRRKSASSVKRFKRDTDAAALQPISAPINMPDANTACNIVKIIKPIGYSASLSDNMHDVLVTFMAMRSDGTEVMVDNRYLKAYNPLLLINFYEMHLRYTPTP

SEQ ID NO: 30712 - protein, 83 aa, Glycine max
  Clone ID: TF_uC-gmroLIB3259P228e07b1.pep
DIFKHNSQVERVIADRISKDNSGNVIPEYLVKWQGLSYAEATWEKDIDIAFAQHTIDEYKAREAAMAVQGKMVDSQRKKSKGW

SEQ ID NO: 30713 - protein, 180 aa, Glycine max
  Clone ID: TF_GmC986_10.pep
MSGRVSGKVKWFNDQKGFGFITPDDGSEELFVHQSQIKSDGFRSLAEGESVEFAIESESDGRAKAVDVTGPDGASVQGTRRGGDGGRSYGGGRGGGYGGGGRGGGGGACYNCGESGHLARDCSQGGGGDRYGGGGGGGGRYGGGGGGRYGGGGGGGGGGGSCYSCGESGHFARDCPSSAR

SEQ ID NO: 30714 - protein, 201 aa, Glycine max
  Clone ID: TF_GmC986_23.pep
MSGRVSGKVKWFNDQKGFGFITPDDGSEELFVHQSQIKSDGFRSLAEGESVEFAIESESDGRAKAVDVTGPDGASVQGTRRGGDGGRSYGGGRGGGGGGYGGGGGYGGGGGYGGGGGYGGGGRGGGGGACYNCGESGHLARDCSQGGGGDRYGGGGGGGGRYGGGGGGRYGGGGGGGGGGGSCYSCGESGHFARDCPSSAR

SEQ ID NO: 30715 - protein, 82 aa, Glycine max
  Clone ID: TF_uC-gmropic007f04b1.pep
MRMMSGRVSGKVTWFNDQKGFGFITHDNGTEELFTHQSDIKSDGFRRLAEGASVKFTIAFKSAWTLHDVDVTGPDGSRVQWT

SEQ ID NO: 30716 - protein, 148 aa, Glycine max
  Clone ID: TF_GmC986_16.pep
MSGRVSGKVKWFNDQKGFGFISPDDGSDDLFVHQSQIKSDGFRSLAEGESVEFAIESESDGRAKAVDVTGPDGASVQGTRRGGDGGRSYGGGRGGGGGGYGGGGGYGGGGGYGGGGGYGGGGRGGGGGSCYSCGESGHFARDCPSSAR

SEQ ID NO: 30717 - protein, 188 aa, Glycine max
  Clone ID: TF_GmC986_24.pep
MSGRVSGKVKWFNDQKGFGFISPDDGSDDLFVHQSQIKSDGFRSLAEGESVEFAIESESDGRAKAVDVTGPDGASVQGTRRGGDGGRSYGGGRGGGGGGYGGGGGYGGGGGYGGGGGYGGGGRGGGGGACYNCGESGHLARDCSGGGDMEAGGGGRYGGGGGGGGGGGSCYSCGESGHFARDCPSSAR

SEQ ID NO: 30718 - protein, 200 aa, Glycine max
  Clone ID: TF_GmC986_15.pep
MSGRVSGKVKWFNDQKGFGFISPDDGSDDLFVHQSQIKSDGFRSLAEGESVEFAIESESDGRAKAVDVTGPDGASVQGTRRGGDGGRSYGGGRGGGGGGYGGGGGYGGGGGYGGGGGYGGGGRGGGGGACYNCGESGHLARDCSGGGGGDRYGGGGGGRYGGGGGGRYGGGGGGGGGGGGSCYSCGESGHFARDCPSSAR

SEQ ID NO: 30719 - protein, 173 aa, Glycine max
  Clone ID: TF_GmC24172_2.pep
MAEERFTGVVQWFNNGKGFGFIKPDDGGEDLFVHQSSIRSDGYRTLLEGDRVEFAIATGDNDKTKAVDVTGVDGAPLQPRASAANNRAGGSGFGARRNGGSGAACYQCGDFGHLARDCNRSSNTGGGGGGSGGGCFNCGGFGHLARDCVRGGGGNVGVGGGCGSGSCFRCGGF

SEQ ID NO: 30720 - protein, 98 aa, Glycine max
  Clone ID: TF_GmC1564_1.pep
MSTTESQRYKGTVKWFNEEKGFGFITPEDGGSDLFVHYSAIQTDGGFRTLSEGQSVEFLVTQDDSGRAAAVNVTTTTVKSSDSGNGENSGGDAANVEK

SEQ ID NO: 30721 - protein, 196 aa, Glycine max
  unsure (1)..(196): unsure at all Xaa locations
  Clone ID: TF_GmC1314_1.pep
MSESEKQRVTGKVKWFDDQKGFGFITTDDSGEEFFVHQSSIRSDGFRSLALGESVEFLIDSDPEGRTKAVDVTGPDESPVQGTRGGGGGGRGSYGGGGGRGGYGGGGRGGRGGYGGGGGGYGGGGYGGGGGYGGGGGGGGGGGCYKCGETGHIARDCSXQGGGGGGRYGGGGGGGGSCYNCGESGHFARDCPSSAR

SEQ ID NO: 30722 - protein, 164 aa, Glycine max
  Clone ID: TF_jC-gmXLIB3563P068bb10a1.pep
AESGPQRALSSPTAAAGLVTITPREEPQLPQPAPVTITATMSSEAETQQPPAAPPVAPALSAADTKPGTTGSGAGSGGPGGLTSAAPAGGDKKVIATKVLGTVKWFNVRNGYGFINRNDTKEDVFVHQTAIKKNNPRKYLRSVGDGETVEFDVVEGEKGAEAAN

SEQ ID NO: 30723 - protein, 107 aa, Glycine max
  unsure (1)..(107): unsure at all Xaa locations
  Clone ID: TF_jC-gmst02400008a08a1.pep
GSRNWYNDQNGFGFITHDDGMEELFVHQSQIKSDGFRILAEREYVQFSIESESDXRATAVDVTGPDRARVQGTRHCGDGRRSYGGGRGGAVSGYRCCIVYCDCVGSG

SEQ ID NO: 30724 - protein, 176 aa, Glycine max
  Clone ID: TF_GmC954_1.pep
MAETRRSTGTVKWFNAHKGFGFITPQDGTDDLFVHFTSIRSDGYRSLSDGQSVEFLLDYGDDGRTMAVDVTSAVRSRLPGGFRGGGGGRGRGGGRYGGGEGRGRGFGRRGGGPECYNCGRIGHLARDCYHGQGGGGGDDGRNRRRGGGGGGGGGCFNCGEEGHFARECPNVGKGNE

SEQ ID NO: 30725 - protein, 72 aa, Glycine max
  unsure (1)..(72): unsure at all Xaa locations
  Clone ID: TF_6134224.pep
MAESRRSTGTVKWFNSQKGFXFITAQDGTDNLFVHFTSIRSNSYRSLSKGQSIKFLLNYSNNSHTITINITS

SEQ ID NO: 30726 - protein, 58 aa, Glycine max
  unsure (1)..(58): unsure at all Xaa locations
  Clone ID: TF_LIB3051-101-Q1-K1-H12.pep
FNNGTGFSFIKPDNGNXNLFHHQYSIRSDGYRTLLEGYRFEFAIVTDNNDKNNAVYFT

SEQ ID NO: 30727 - protein, 159 aa, Glycine max
  Clone ID: TF_15285323.pep
GTLRNVPVGGGCRRNKRSRGSSSSNTRSPANSDRQTASAGSASTTSGSSSADLVASLGGGTGVPPSLRFMAPLHQLGDHHHLGGGGGEIGLSYGLNYGAISGPMGGIGDLNFHIGGTLSGGGSMLSGLDQWRVPQTHQFPFLSGLEATSSHGLYPFEGA

SEQ ID NO: 30728 - protein, 206 aa, Glycine max
  unsure (1)..(206): unsure at all Xaa locations
  Clone ID: TF_GmC735_1.pep
TVHVALPTVPVGAGSRRNNXSKRSSRSKSPASSEKQQTLSGSTSAIVPSGGTTHEQIGHQLPQPQNLPFLASLQNLNRYAVGNMGLGLREIHGQNENMGFQIGNSSAGGGMDQWRLHQQVPFFNGFESTSAGXYPFQNEGINETPSGFGGDITTNSRVSQMPSVKMEESGALNLSRSTLNNVSENNQYYSWTDMSGLASFSATHLL

SEQ ID NO: 30729 - protein, 348 aa, Glycine max
  Clone ID: TF_GmC61107_1.pep
PRAEFGTRAQRKPSSINGGGGGGGVLLPITTPSPSSFPSSTTSDVTLTSTTTTAATTAATAATTTTAVENLRCPRCDSSNTKFCYYNNYNLTQPRHFCKTCRRYWTKGGALRNVPIGGGCRKNKSIGVASSVAGKTASTKMKTIASEFGKSPGFGGGFEVEHELPPPPGQILWGSPQNTHLLALLRATQTQNPNPNPSPMSLKEEGTLLGHMVSTDQPLVSNTLLSYRTLGYDAVAQVPSSLGLFGRNNQDQQQQNGGFLVGEHHNNSGIQELYQKLRSSSTVNNNYCSDNNSSQMFMGNMASNYSSSVSNNILETTSVAGGEFGYWNGPTFSNWSDLPTTNGAGAYP

SEQ ID NO: 30730 - protein, 148 aa, Glycine max
  Clone ID: TF_GmC161628_1.pep
YWTAGGTMRNVPIGAGRRKNKHLASQYRHIIVTSDGIPTSRLETTDSSGLQQQHIASLESSVPFRSSADNGTVLKFGPDIPLCESMDSMLNLRDQRRCVDASSISCVEYRGEPSLYGSSVTTNGAQGSELSEHSPSNWLQCYPVPPWV

SEQ ID NO: 30731 - protein, 179 aa, Glycine max
  Clone ID: TF_GmC68522_1.pep
MSEAKDPAIKLFGKTIPVPEILPGSNGAPASSSGDVVVDDSVDASSTNSSRESHTNTDAQEKDFDKDTLGEKPTDDKKEDGAPAQSSEEVTNLDTASGTCEESITLSTEREATTLKTTKTEEEQGETSYSQDKNLKKPDKILPWPRCNSMDTKFWYYNNYNVNQPRHFCKNCQRYWTAG

SEQ ID NO: 30732 - protein, 385 aa, Glycine max
  Clone ID: TF_GmC1363_1.pep
MLESKDSTMKLFGKTIPAPEISAGAPALSSGDADAVGVVQNHGSSSVNGDGEEHEIEQDIMGEETTESEKEDEVTNLDTVSRPGEVSINPSTKKEDLTLKTSKKTEQEQGENSQDKTLRKPDKILPCPRCNSMDTKFCYYNNYNVNQPRHFCKNCQRYWTAGGVMRNVPVGAGRRKNKNFTSQYRQITVPEAALLSSQPDLPNGVSHPSLNCNATLLAFGSDTPLCESMTSVLNLAEKAVNNSTTNGFNGSEELEIPFAYVAGEKVNDDSNKSSDMSTKPMEGETTNRSQEQVIENCHPFPPHAPYFPGAPWPFPWNPALWNSPVPSPPAFFPQGFTMPLYPAAAYWGLTIPGAWSIPWLAQPSLPNSTVSNSGPDPIARTIAMS

SEQ ID NO: 30733 - protein, 326 aa, Glycine max
  Clone ID: TF_GmC584_2.pep
MGSNGGSSNNNKVMEKPGQNQLVQQQQHPETLKCPRCDSSNTKFCYYNNYSLSQPRHFCKACKRYWTRGGTLRNVPVGGGCRRNKRVKRPITSPCSAAIDTASNSSNSSSAPTAAASLQPQIDTASTSNHINPLFYGLPSSSSDVNLPLFSRFGSRISSSGFDLQLNNALGLGFSSGVLSNEASDNNGYRSGFGSNNMLLSSYTSTTTTTPAMSSLLLQQKFISGGLKNDADSSNTFQHGLSLTSLEQLQIASDHSSEAGMVALKDVKVELGQNNNRLEWNGGAFQSQIQHVGLYDPLLYWNNSATALGVWNDQAANIGSSVTSLI

SEQ ID NO: 30734 - protein, 139 aa, Glycine max
  Clone ID: TF_LIB3242-349-Q1-J1-C1.pep
MHGYYRSLGKHGVRFFSLVFSLMHKFRAVHSELVRSMEDIGPNSCTRPVTEKKARPLEQLNCPRCSSTNTKFCYYNNYSLTQPRYFCKTCRRYWTEGGSLRNVPVGGGSRKNKRVTSSKVPDLNPPISLSSVSAISSQN

SEQ ID NO: 30735 - protein, 89 aa, Glycine max
  Clone ID: TF_GmC108_1.pep
MGLSSKQVSSSGLDWKQTLLEAQNLELPKPNLMRKQQQQQQQQQQQTQPNSESLKCPRCDSTNTKFCYYNNYNKSQPRHFCRACKTHWY

SEQ ID NO: 30736 - protein, 311 aa, Glycine max
  unsure (1)..(311): unsure at all Xaa locations
  Clone ID: TF_GmC66473_1.pep
KSFLYLHPSIGTAQWPQDLLVKAIEAIVVPKTCPKDQQSKSRPQKELDFIFPWCHSINTKFSYYNNYSGTQPNCLCNACRXYWTEGXTTFNIPVGGASKKKSYSSSKVSSHYHNHLKHHSLHSHILSEFVQELYKVWHTQNPNSNNAIHQCQDLNLAFPSSTPDFRKISELVQQNNNNNNSSNNSMSASASSSSTTTTTSTSHLSALELLTGITSSSSAGLTSFMPVPVPSDPNSIYTCGFPLQDFKPTLNFSLDGIGNGYTSLQNVQSGRLLFPSDDLRQVSSSTITTMDQKQQGDSTGYWTGMLGGGSW

SEQ ID NO: 30737 - protein, 122 aa, Glycine max
  Clone ID: TF_LIB3167-024-P1-K1-C9.pep
MEGMAPNSCARPVVEKKARPQEQLNCPRCNSTNTKFCYYNNYSLTQPRYFCKTCRRYWTEGGSLRNVPVGGGSRKNKKVSVTASSSPKVPDLNPPNHSAISSHNPKIMHGGQDLNLAFQPWK

SEQ ID NO: 30738 - protein, 289 aa, Glycine max
  Clone ID: TF_GmC55946_1.pep
MFPQSFNISGGGAGLEQLLQPHHFPSPMEQQQQRSRWKPSVEVAPNCPRCASTNTKFCYYNNYSLSQPRYFCKGCRRYWTKGGSLRNVPVGGGCRKNRRGKSLQSSSSRQQRASSFVSGDTESSFSDAQQINNGSRDIDMALVFAKFLNPKPTTGEDNNGSSSTSNNFTPESVEIENDAVVQSQNKASSDPVIVESENLSLGEIDELERLLGVCGDEDGLWSDATLSSSVTWEPPLKELEYSMPLNEDDDDAQLLPIITSASTMISDSCWSNWSSFDLSTMEAFSSSPS

SEQ ID NO: 30739 - protein, 285 aa, Glycine max
  Clone ID: TF_GmC6535_1.pep
MNPSSGQPQQMSSQSVEKKPKPHPEQALKCPRCDSTNTKFCYYNNYSLSQPRYFCKSCRRYWTKGGTLRNVPVGGGCRKKRSSSLKRAQDQTLTPNLNPLTTLPHLSYDSNDFTLAVARFQKQSSGQLGYNDRDLSTLGNPTTGSFCDILGNSGMNPSSANPSFLDAIRTGFLETQNHLQNLYCMYGNGDLGEVDNGNSGVVGVSGEMMLPYDQVIMSNATTQSVSVMKQEMCSRREQSERRVLGGFPWQINADTNIGELDSGRTIASWNSFTNSWHGLLQSPLM

SEQ ID NO: 30740 - protein, 349 aa, Glycine max
  Clone ID: TF_GmC476_1.pep
AYTCKKNSQQPNQQAGIGTNNPQIPPPLQPSPPSSVTTGIGGSDYIQGSIRPGSMADRARMAKIHQPDAALKCPRCESTNTKFCYYNNYSLSQPRHFCKTCRRYWTRGGALRSVPVGGGCRRNKRNKGNSARSKSPMKPSASANSSSSGCTPDHVMMTHLPTPITPTQFPFLASLHHYNGDYVSGGIGSHFGAITTPLFQIGTSSASSLGNISGGAMLSNNGLGDQQWRFNNLQQVQHQFPFLSTNFEPQIGVFQFGGGENNNAEPPSYAKGHGGRFNNIRSKMDSINSSVSGIVPQLNTIKLEENQGLSLSKNLLMTSSGNGVLWNNGSSGNAWSEVPSFIPSPNHLL

SEQ ID NO: 30741 - protein, 211 aa, Glycine max
  Clone ID: TF_GmC551_1.pep
MQDPTLFQPMKPHFPEQEQLKCPRCDSTNTKFCYYNNYNLSQPRHFCKNCRRYWTKGGALRNIPVGGGSRKNTKRSSSSNNNTKRASPSPPVSSAPAPEPDPTRIGPTPVVGGGSFSSLLASSGHLGLGNLLEGLNSSGSNLKTVQMEEFGENVSSGPVADPDSGRNPGLEMQSNGNAESFLSLQNGDSGCCNGTNGWSNLAIFTPGSSYQ

SEQ ID NO: 30742 - protein, 211 aa, Glycine max
  Clone ID: TF_GmC551_2.pep
MQDPTLFQPMKPHFPEQEQLKCPRCDSTNTKFCYYNNYNLSQPRHFCKNCRRYWTKGGALRNIPVGGGSRKNTKRSSSSNNNTKRASPSPPVSSAPAPEPDPTRIGPTPVVGGGSFSSLLASSGHLGLGNLLKGLNSSGSNLKTVQMEEFGENVSSGPVADPDSGRNPGLEMQSNGNAENFLSLQNGDSSCWNGTSGWSHLAIFTPGSSFQ

SEQ ID NO: 30743 - protein, 252 aa, Glycine max
  Clone ID: TF_GmC1650_2.pep
MEDIGPNSCTRQVAEKKARPQEQLNCPRCSSTNTKFCYYNNYSLTQPRYICKTCRRYWTEGGSLRNVPVGGGSRKNKRVTSSKVPPDLNPPSLSSVSAISSQNPKMQGVHDLNLAFPTAIDNYHGMSPYVEMPKLEIGGDHSTSHSHHHSPSAVELLRSGMASRGLNPYAPNSMMSTSDHSLYTTGYPMQEIKPNLSFSVDDGFGNRSYGVQENGGGRLLFPFGDIKHLSAGVEVEHNKERGNNSTGYWTGW

SEQ ID NO: 30744 - protein, 153 aa, Glycine max
  Clone ID: TF_GmC1387_1.pep
MGEESQGIKLFGALITLKGGEVKKGEKGSEYERVEKRAEKIIPCPRCKSMETKFCYFNNYNVNQPRHFCKSCQRYWTAGGALRNVAVGAGRRKAKSPCHGAGDFMDGRAYETSEDENRFEMNQGHVAMPNTHFRQIFQAKRQRITSGAQHQGQ

SEQ ID NO: 30745 - protein, 147 aa, Glycine max
  Clone ID: TF_LIB5119-021-A1-PF1-F7.pep
MAEESQGIKLFGAMITLNRGEVNKGEKGSEYERVEKRAEKIIPCPRCKSMETKFCYFNNYNVNQPRHFCKSCQRYWTAGGALRNVAVGAGRRKVKSPCHGAGVYESTSEDENKFEMGQGHVAMPNTGFRQIFQAKRQRITSAQHQGQ

SEQ ID NO: 30746 - protein, 156 aa, Glycine max
  Clone ID: TF_GmC52517_1.pep
MPSSNSGESRRASKPQSSGGAAPPPPEQENPPCPRCDSTNTKFCYYNNYNYSQPRHFCKSCRRYWTHGGTLRDIPVGGGSRKNAKRSRTHHVAATSSSSTSCTMTSAQEHHAHTLLAPVASTHYGVLDGDVKQTSNGNGNVCGSFTSLLNNTHGSG

SEQ ID NO: 30747 - protein, 285 aa, Glycine max
  Clone ID: TF_GmC108_2.pep
MGLSSKQVSNRGLDWNQTLLQAQNLELPNPPPMRKQQQTQPSEPLKCPRCDSINTKFCYYNNYNKSQPRHYCRACKRHWTKGGTLRNVPVGGGRKNKRVKKSTTPAIATTSISTSTSNANMDGELNNPITIPSLAVDDHKTTPSSLYQYVCLPQQMMMSTKDSEEGKDFGIGNGIFLSSTVPFPQSQSLLFPFTTSNSFDPNLCAISSSFRSSSVYNYGEEFKIMEEPTLNSIMPNTSGSTNTQPWEIAATSSGMEMSNYWTWEDIDSFVSTDPNVPWDDSDIKP

SEQ ID NO: 30748 - protein, 147 aa, Glycine max
  Clone ID: TF_LIB3242-248-Q1-J1-F9.pep
NKFSKSQKRTIYSYSLYAILLNIPELFSLLLLNNFFLSFFLLVLQQQNQHQANGSNSPHELLPPLPQPPQAPHVGVESEQIRSGLMADRAKIPAPEGVLKCPRCESTNTKFCYFNNYSLSQPRHFCKTCRRYWTRGGALRNVPVGGG

SEQ ID NO: 30749 - protein, 118 aa, Glycine max
  Clone ID: TF_GmC52517_2.pep
MPSSNSGESRRASKPQSSGGAAPPPPEQENLPCPRCDSTNTKFCYYNNYNYSQPRHFCKSCRRYWTHGGTLRDIPVGGGSRKNAKRSRTHHVADTSSSSTSSTMTSAQEHHAHTLLAP

SEQ ID NO: 30750 - protein, 83 aa, Glycine max
  unsure (1)..(83): unsure at all Xaa locations
  Clone ID: TF_GmC154178_1.pep
MSPDDTPPPKPATAKDQETQSSGGGRKSSSTRPQEQGLKCPRCDSPNTKFCYYNNYSLTQPRHFCKTCRRYWTKGGAXRNVPI

SEQ ID NO: 30751 - protein, 471 aa, Glycine max
  Clone ID: TF_GmC196_1.pep
MHEIRDPAIRLFGQKIPFPEDVDKEEESAEDREQEMEEHEDEGDKDTRVENVTKEELEADPPLDAEETKISGTSPEAIVNPKTPSIEEETAKSKGGKSEKEQGDAANSQEKTLKKPDKVLPCPRCKSMDTKFCYYNNYNVNQPRYFCKDGCEKTTEGGTMRNVPVGAGRRKNKNSTSHYRHITISEALQAARIDAQNGTHLPTLKGNGRVLSFGLDAHAPICDSMASLMNLGEKKALNGTRNGFHHGFEDQRLPVPCKSGENGDDSSTTSSITISSPKGENNKSTFQQQPLPQNHGFLPQVPCIPGVPWPYTWNSPVPPPALCPSGFPLPFYPATFWNCGMPGNWNVPWFSSSSPASNLKSPSSSPNSPTLGKHSRDSDMIKQDSLHKEEASTPRNGSVLVPKTLRIDDPSEAAKSSIWATLGIKNESVSGGAMFKAFQSKKGEKNHVEASPMLMANPAALSRSLNFHENS

SEQ ID NO: 30752 - protein, 111 aa, Glycine max
  Clone ID: TF_GmC128906_1.pep
MEQGVEEGGGMNKIPRDSRVKEIRQGDAQIQVQAPQQPQKCPRCDSLNTKFCYYNNYSLSQPRYFCKTCRRYWTQGGTLRNVPVGGGCRKGKRAKSSNSSSSENMNSSSRS

SEQ ID NO: 30753 - protein, 204 aa, Glycine max
  Clone ID: TF_GmC261506_1.pep
MQENKDPAIKLFGQKIAFAGEVDPPAISAGEIDSPPAMDVDKDEEDDFGDSETEDEKDKDPRAEKVSEKTKEADPPPNAADSKKTPEGIQNPNTPSIDEESAKSKTNKSENNNNNKTLKKPDKILPCPRCNSMDTKFCYYNNYNVNQPRYFCKACQRYWTAGGTMRNVPVGAGRRKNKNSASHYRHITISEALQAARIDAPNGT

SEQ ID NO: 30754 - protein, 314 aa, Glycine max
  Clone ID: TF_GmC433_2.pep
MMGRVMEKPSQDLLQQQQQALKCPRCESSNTKFCYYNNYSLSQPRHFCKACKRYWTRGGTLRNVPVGGGCRKNKRVKRPTNHGDSSSSAANSPSSSNSNPPSQPHLDNIIASSSTTNHINNISPFFYGGDVMSSVPFPRFNLHSQLNALGLGFSTGVSENGFSTSNNNSFFSAYNSMFGSSSSSTCAPSTPVMASLLSSTLLQQNLMGGGGGGVKGRDHDQGDNTFHGLAPLQGLRVEGDSNNNIGSKEVKGEGQNRFEWSNNNNNNNNNGGGGQNQMEHVGLSDPNSLYWNTATGLGAWSDQPNIGPSVTSLI

SEQ ID NO: 30755 - protein, 257 aa, Glycine max
  Clone ID: TF_GmC1650_1.pep
MEDIGPNSCTRPVTEKKARPQEQLNCPRCSSTNTKFCYYNNYSLTQPRYFCKTCRRYWTEGGSLRNVPVGGGSRKNKRVTSSKVPDLNPPISLSSVSAISSQNPKMQGVHDLNLAFPAAMDKYHHGTSPYVEMPKLEIGGDHSTSHHSHHHSHSPSSAVELLRSGMDSRGLNPYAPNSLMSGSDHSLYTPGYPMQEIKPNLSFSVDDGFGNRSYGVQENGGGRLLFPFGDIKHLSAGLEVEHNKEQGNNSTGYWTGW

SEQ ID NO: 30756 - protein, 211 aa, Glycine max
  Clone ID: TF_GmC2047_1.pep
MQDPTAFQGVKPPQFPEQEQLKCPRCDSNNTKFCYYNNYNLSQPRHFCKNCRRYWTKGGALRNIPVGGGSRKTTKRSSSTLSKRSSAPSSSSAVSDPDPTRICTNPVDQDQRVLNIGGGSFSSLLASSGHFGTLLEGLNPSGSGLKMGEFVEGVSSDPGLNLDSGLNPDLQVQSNENSESFLGLQNGDSSCWNGTHGWSDLAIYTPGPSFQ

SEQ ID NO: 30757 - protein, 92 aa, Glycine max
  Clone ID: TF_uC-gmrominsoy244h03b1.pep
MVFSSIPVYSDPPNWQQQQQNQHQANGINSPQLLSPLPQPPQAPHVGVEAGQTRSGPMADRAKIPAQEGVLKCPLCESTNTKFCYFNNYSLS

SEQ ID NO: 30758 - protein, 75 aa, Glycine max
  Clone ID: TF_15814345.pep
LQSLERPLCQSYNTEFCYYIYYILSQPKHFCQACFRYWTAGGTLSHVPGGGACKTNKRANRPPLHGDSSSSAAML

SEQ ID NO: 30759 - protein, 324 aa, Glycine max
  Clone ID: TF_GmC384_2.pep
MHETHSIGGGRFYGGGDRRLRPHHQQQQPPPLKCPRCDSLNTKFCYYNNYNLSQPRHFCKNCRRYWTKGGVLRNVPVGGGCRKSKRSNKPKTTTTTTTSNTNNNRSSFSATAPATAPTPPAPELEHHSHSHSSSESSTLTVTATEEMSAPPPTTSNAPSKNSLLLDNDHREAKMFANPNPNPSLDSGGIFSEIGNFTSLINLNNNEAFGFGNNKNNNSILDATSFRFGISVTNQVQAAAGGGHGQWQQQNHQEFGTASFLDHTVPLEFSSLQHKTGHQGGFGSLDWQPGADQGLFDLPNTVDQPYWTHAHWSDQDNTSSLFHLP

SEQ ID NO: 30760 - protein, 271 aa, Glycine max
  Clone ID: TF_GmC503638_1.pep
MIEKWWKANNVEISPNCPRCGSTNTKFCYYNNYSSTQPRYFCKGCRRYWTKGGSLRNVPVGGGCRKSRSAKYNKTFRQANNSVGYSDDLMASPNSVVSDAPSIDLAQVYASFLNQKPDQAVQTVRYPNEPDYYSCLLNTTDFGHSALSEEELGLTDCLHFHEQSTESHFGESFQMYLFGFNSIHNHQEYYSSSYDTTNNTNFELPQLPGEETEISHGDMLWSKSNSEMMLDHALQASQPPLFGPQSHDADFIMGNCWSHFDLPRDASFSTL

SEQ ID NO: 30761 - protein, 309 aa, Glycine max
  Clone ID: TF_GmC684_1.pep
LLLLNNFFLSFFLLVLQQQNQHQANGSNSPHELLPPLPQPPQAPHVGVESEQIRSGLMADRAKIPAPEGVLKCPRCESTNTKFCYFNNYSLSQPRHFCKTCRRYWTRGGALRNVPVGGGCRRNKKNKRSRSKSPVSTEKPSLPNNTSAIPELIGRFPQPFMASLQSMNRYGVGINTGVNLREIQAQNASQMEFQIGGLGNGSSVATAGGGGGGGVEQWRFQQFPFLNGFESTSAASNSYPFQSEIVEGLVGDINATSSRITQLPARVKMEYNGGLNLSRSPLNVSENSNHFYSWTDLSGLASSSASHLL

SEQ ID NO: 30762 - protein, 341 aa, Glycine max
  Clone ID: TF_GmC384_1.pep
MLEIHSIGGGRFFGGGGDRRLRPHHQNHHQQPPIKCPRCDSLNTKFCYYNNYNLSQPRHFCKNCRRYWTKGGVLRNVPVGGGCRKSKRSNKPKTTTSAAATTSSNNNNNNPSSSSETAAATAPTPPQQPPPPLELEHNSHSHSSSESSTYTVAATEAMSAPTTNAVSNNNLLLDNNRESKMFANPNPYLEQSRSGGLFSDIESFSSLVNLNNQALGFGFGNNNSNISILDATSFRFGVSVTNPHGNDQVLAAPGGGHGQWQQQQQNHHEFGTASFLDHTVPLEFSSLQHKAGHQGGFGPLDWQPGGDQGLFDLPNTVDQPYWTHHTHWSDQDNPSSLFHLP

SEQ ID NO: 30763 - protein, 186 aa, Glycine max
  unsure (1)..(186): unsure at all Xaa locations
  Clone ID: TF_GmC245668_1.pep
ELVKARLAIELDPDSSGDHVLLSNVYAVAGKWKDVSSIRRTMTEHSMKKTPGWSMIEIDKVIYGFVAGEKPNEVTEEAHEKLREIMLRLRTEAGYAPQLRSVLHDIEEEEKEDSVSKHSEKLAAAFGIAKLPKGRILRIVKNLRVCGDCHTVMKLISXVYKVEVIVRDRSRFHSFKDGFCSCRDYW

SEQ ID NO: 30764 - protein, 68 aa, Glycine max
  unsure (1)..(68): unsure at all Xaa locations
  Clone ID: TF_jC-gmXLIB3563P006Da01d1.pep
RPRCETSNTKFCCCNNYSCAQPRHFCRACTRYXTRGGPLRNIPDGGGCRKNTRVKRTTXHGDSSASCC

SEQ ID NO: 30765 - protein, 373 aa, Glycine max
  Clone ID: TF_GmC593_1.pep
FPNLHSSLPLSLSFFLSLCSLNGAATREHGNTKRPRCHTRPKNHHHNNKASAGTRRKVPAMRLIQHKVLLLQQLQPHPAQALLQDLQKVLDQRRSLAQRPDRRRLQEEQKGRRQALFLFVIFITKTFNLGALPFPSRLNTNHHIPTIINTGLFNNNQLSPFLDVKSALFQLDAPPAALSNSLMGIAPPSAQNNNFWALGRSQSSTLSDPLNSTMQSMQQSLNVHSSLASSIESLSCVNRDLHLKMQQQRYATMMSGGDTHHKGDENSGVSFPQTVNGFENQKLVMNPVMFQKPVESLPAGSAVTEGPSGASVTTVAPPTEWFFGNSSFPSTGNGGGNGNNNINININDANNNWSDALAWGNFQQQQQQYSALP

SEQ ID NO: 30766 - protein, 250 aa, Glycine max
  Clone ID: TF_GmC166330_1.pep
MGLSSLHVCMDSSDHWLQGTIHEESGMDSSSSPSGDMLTCSRPMIERRLRPPHDQALKCPRCDSTHTKFCYYNNYSLSQPRYFCKTCRRYWTKGGTLRNIPVGGGCRKNKKVSAKKSNDHQLVNNNNINQTRPPHHHHPKDLQLSSFPDVQFSHLSNLLGTNANPSFMEGKYGIGMIENPRPIDFMMESKLEGIIGSGSSSRNNFDFFGNSDMSMGMTSVGLGDMNSTQNGLPPNFHHHGLSAFGGMSMS

SEQ ID NO: 30767 - protein, 348 aa, Glycine max
  Clone ID: TF_GmC584_1.pep
FFLPCSYFHHQLDDHKVFLGSNGGSSNNNNNKVLEKPGQDQLVQQQQQQQEAPKCPRCDSSNTKFCYYNNYSLSQPRHFCKACKRYWTRGGTLRNVPVGGGCRRNKRVKRPLITTNPSSAAIDTAASNNSSNSSSAPLQPPIDTASTSNHINPLFYGLPSSSSDVNLPLFSRFGSRISSSGFDLQLNNALGLGFSSGVLSNEASDNNGYRNWFGSNNTLLSSYTSTTSTTTPAMSSLLSSSLLQQKFMTDGVDSTNTFQHGLGLTPLEQLQMASDHSSEAGMVALKDVKVELGQNNRLEWNNGAACQSQIQHVGLYDPSLYWNNSAATALGVWNDQAANIGSSVTSLI

SEQ ID NO: 30768 - protein, 322 aa, Glycine max
  Clone ID: TF_GmC67052_1.pep
QEKEKSGLLTEDEALLLTPPTSSSPSLSPSCTTSITTSTATATSSNSENQNLRCPRCDSSNTKFCYYNNYNLTQPRHFCKTCRRYWTKGGALRNVPIGGGCRKSKSSGMSNSVAKQTATKMKAVASELGRSSSQGLLDQELPQTPAILWGSPQNSQLMALLRANQNHNPNPNPSPMSIVVKGEGNLMGSHHMVAEPLLANGLLNPRTSLGFDGVGEVLPSLGLCGSFWRNNQDQTQQQNNGFALGEHQSSGVQELYHKLRSSSSSINYCGSDNSPVFLSNMASSSSSLSNILESSSVSGSEFGCWNPTLSWSDLPTTNGAYP

SEQ ID NO: 30769 - protein, 297 aa, Glycine max
  Clone ID: TF_GmC494_1.pep
MDTAQWAQGIGVVKQPMEGSKPPPPPPPPMLERRARPQKDQALNCPRCNSTNTKFCYYNNYSLSQPRYFCKTCRRYWTEGGSLRNVPVGGGSRKNKRSTPPAPPSAPAPTKKLSDLATPNFPQSASQDPKIHQGQDLNLAYPPAEDYSTVSKFIEVPYSTELDKGTTGLHQNPTSSSTTTSASSQLSAMELLKTGIAAASSRGLNSFMPMYNSTHGFPLQDFKPPHGLNFSLEGFENGYGGLQGIQEGPTGGARILFPTVEDLKQQVPSTNEFDQQNRSQEGSAHGYWNGMLGGGSW

SEQ ID NO: 30770 - protein, 164 aa, Glycine max
  Clone ID: TF_GmC494_3.pep
KHPSLFACFVCFLPKTIFFSEAKVLNFSYGLLLSFCFYCFEKNWIFFQGIGVVKQPTMEGGSKPPPPPMLERRARPQKDQALNCPRCNSTNTKFCYYNNYSLSQPRYFCKTCRRYWTEGGSLRNVPVGGGSRKNKRSTSSAPPPSSASAQAKKLPDLTTPNFPQ

SEQ ID NO: 30771 - protein, 204 aa, Glycine max
  Clone ID: TF_LIB5118-054-A1-PF1-B4.pep
MDTAQWAQGIGVVKQPTMEGGSKPPPPPMLERRARPQKDQALNCPRCNSTNTKFCYYNNYSLSQPRYFCKTCRRYWTEGGSLRNVPVGGGSRKNKRSTPSAPPPSSASAQAKKLPDLTTPNFPQSASQDPKIHQGQDLNLAYPPAADYNTVSMSKLIEVPYNTELTRVAFIKTLLPHQHQHLHLLTISCLPWSFSRLLLLLPQV

SEQ ID NO: 30772 - protein, 304 aa, Glycine max
  Clone ID: TF_GmC108_3.pep
MRKQQQQQQQQTQPNSESLKCPRCDSTNTKFCYYNNYNKSQPRHFCRACKRHWTKGGTLRNVPVGGGRKNKRVRKSITTPITTSSTTTSITTTTSTCTATVTTSIGNNNNNMDAMLGCNSHMTIQTPLADDHKNMSSSLYQALIRPPPLLLQQQNLMNNTRDLEGKDFGIGIGNGNNGIFPSLTLPFPIHHQSQSLLFPFSTSSSSFDTNPCSVVSTSLRSSNVYNYGEDQFKAIEEPTINSTITTTTIVPSTNNTHHPWEIAAATSGVGLGTSSNSNYWNWEDFDSLVSTDLKDPWDGSDIKP

SEQ ID NO: 30773 - protein, 310 aa, Glycine max
  Clone ID: TF_GmC479_1.pep
MDPSSGQHQQMSSQSLENMLACSKAHQERKPTPQPEQALKCPRCDSTNTKFCYYNNYSLSQPRYFCKSCRRYWTKGGTLRNVPVGGGCRKNKRSSSSSSTSKRVQDQAFTPNVNPLTGLPSLMSYDSNDLTLALARLQKQSCGQLGYDDHDLSMLGNHHTNTPCGDNILGMHHHSSSSSTNPGFLDALRSGFLGTQSNNNMHQNMYYGYGNGDMGEVDNGGGVGVSSSGEMMMMMMPYNNDQEMSIASTQAVTVTTMKQEICNGREQKVLWGFPWQLNGDTNMGELDSGRASNWNGINSSWHGLLNSPLM

SEQ ID NO: 30774 - protein, 105 aa, Glycine max
  Clone ID: TF_GmC479_2.pep
MDPSSGQHQQMSSQSLENMLACSKAQQERKPRPQPEQALKCPRCDSTNTKFCYYNNYSLSQPRYFCKSCRRYWTKGGTLRNVPVGGGCRKNKRSSSSSSSTSKRV

SEQ ID NO: 30775 - protein, 112 aa, Glycine max
  Clone ID: TF_jC-gmro02910037e01a1.pep
MIQEMLGGASASHIPGERKISINNGGRGRALLLTPPTSSSSPSCTTSITTTGTGTVTLSNSENQNLRCPRCDSSNTKFCYYNNYNLTQPRHFCKTGRRYWTKSGALQNVPIG

SEQ ID NO: 30776 - protein, 51 aa, Glycine max
  Clone ID: TF_14258423.pep
MGRIMEKPSQDLFQQQQQALKCPRCDSSNTKFCYYNNYSLSHPRHFCKACK

SEQ ID NO: 30777 - protein, 300 aa, Glycine max
  Clone ID: TF_GmC384_3.pep
MQQIHSMPGGRFFSGSGSADRRLRPHHQNQQALKCPRCDSLNTKFCYYNNYNLSQPRHFCKNCRRYWTKGGVLRNVPVGGGCRKSKRSSKPNKITPSETASPPPPPHPDHNNNSNSHSSSESSSLTAAAATTTEAVSAPETLNSDSNNNNNMQESKLLIPALETNNSLEQGTGDCGGIFSEIGPFTSLITTTTSTNEPLGSGFGFGNSTLPDASSFQWHYQKVSSNNEELKLPENSFLDHTVDLSGMHSKTSHGGGFGSLDWQGGADQGLFDLPNTVDHAYWSHTHWSDHDNSSSLFHLP

SEQ ID NO: 30778 - protein, 291 aa, Glycine max
  Clone ID: TF_GmC730677_1.pep
STTSSGIFENPKTPSAETETSIPKSSTNGEKSEKSASEEKTLKKPDKVLPCPRCNSMETKFCYYNNYNVNQPRHFCKNCQRYWTAGGTMRNVPAGAGRRKNKNSSATVSHYRHIMFSEGLQGATLNAPNGLHNAVMTFGPDSPLCDTMASMLNIAERAQSCVPNGFHVTEPNSFVSYRKEEEEDGTSGHSTGVNSVATTSTLSHSGSHESLDKKVVEGFTPQFPYFPSAPWPYPIPPSTFFPQGYPLSLYTTPAYWSYMPPSWNNNISAISPESSINNSVSNPTLGKHSKD

SEQ ID NO: 30779 - protein, 258 aa, Glycine max
  Clone ID: TF_GmC196_2.pep
MHEIRDPAIRLFGQKIPFPEDVVVDKEEKEIESGEEREQEMEKYEDQGHKDAGVENVTEEELEVDPPPNAEETKNSGSSPEAIVNPKTPSIEEETEKSKGDKTEKEQGDAANSQEKTLKKPDKVLPCPRCKSMDTKFCYYNNYNVNQPRYFCKACQRYWTAGGTMRNVPVGAGRRKNKNSTSHYRHITISEALQAARIDSHLPPLKGNGRVLSFGLDAHAPICDSMASVNNLGEKKPLNCTRNGFHHGFEDQRLPPVP

SEQ ID NO: 30780 - protein, 145 aa, Glycine max
  Clone ID: TF_GmC190_1.pep
MAEAQSGQASEGIKLFGTTITLHGRERKEDRNDSEDGTEEIKRPDKIIPCPRCKSMETKFCYFNNYNVNQPRHFCKGCQRYWTAGGALRNVPVGAGRRKVKPQFGQEERLALDEWHVAAVAHGDFRQLFPSKRRRMSSGGQRQPC

SEQ ID NO: 30781 - protein, 83 aa, Glycine max
  unsure (1)..(83): unsure at all Xaa locations
  Clone ID: TF_uC-gmropic043a02b1.pep
MNPSRGRPQYRPMQSQEKKPKPQXQQAMKRPRXDSTNRKFCYYDTDSLTQAGCLCQSCTRYRAQXGTLRNVPLGGGCRKLRAC

SEQ ID NO: 30782 - protein, 185 aa, Glycine max
  Clone ID: TF_16343727.pep
MIKKTNTHYTKFRSQRDKDMEQEGEKGREEKRQIQQQQPPPQQHQKCPRCDSMNTKFCYFNNYSLSQPRHFCKACKRYWTLGGTFRNIPVGGGSRKVKRGKTNSPSSSSSSSSCSNLLSQPQQNLLMRPSPPPLTTNTMVQSTSPYYYNLGVGGNGYLSFHSSLNNNTPSQPSDQYLKVGDHSSP

SEQ ID NO: 30783 - protein, 66 aa, Glycine max
  Clone ID: TF_LIB3139-100-P1-N1-D12.pep
AHDIAYKKKLLFPGYKVHQGECFKKLACVLSKFVIHELNGTKPLGKVQNWELLSLPLIRNHHQPQP

SEQ ID NO: 30784 - protein, 51 aa, Glycine max
  Clone ID: TF_jC-gmXLIB3563P034ba06d2.pep
VSRGPSICSVLMGDHAKKHGLIHVVVVEVTGFSFYALAVGQGLYNQSIFRL

SEQ ID NO: 30785 - protein, 72 aa, Glycine max
  Clone ID: TF_jC-gmst02400020dg01d1.pep
LIVWFTPTYPGYYYAYIFNDQELQLSLRQANHTRCTDMTYDRLYIMILVIVQVSLLIGLVKNNQRGSLGLFH

SEQ ID NO: 30786 - protein, 367 aa, Glycine max
  Clone ID: TF_GmC239_1.pep
MRYVEDKGCYNNNGPTQETPNSSAMYSEFHKGKDATRVSNHHHRATMGKPTPSKWDDAQKWLVGLSKGGEKSHSKSKPRNSNADDLRLIAPVPQKEHDYSSSEKEEEENDACHDFMTNIISANAIAAQYEAEAKRVECDESNWGSNNNNNDNRFSGNTIQVQPICFRDMGTEMTPITSQEPSRTGTPIRATTPATRSPIHSGTSTPMRGQNGLQQVAEGGHGTTRKCGDQGSTSPCKKTHEDHQARKLSPLESRAMAWDEAERAKFMARFKREEVKIQAWENHQIRKAEMEMKKMEVKAERMKALAQERFANKLASTKRIAEEKRANAQVKLNDKALRTTERVEYIRRTGHVPSSFSFSFKLPSICW

SEQ ID NO: 30787 - protein, 70 aa, Glycine max
  Clone ID: TF_uC-gmflLIB3275P059b07b1.pep
VEVERIQGKAQDKLTNKLAAARHKAEEKRAAAEANRNHQAAKTEEQAEYIRRTGHVPSSYLSFSCCNWCS

SEQ ID NO: 30788 - protein, 133 aa, Glycine max
  Clone ID: TF_GmC356_3.pep
HRALFSGRGSEKVESWKKELSTQSSTWDVSETSKPASKTRSEEAKISAWENLQKAKAEAAIRKLEMKLEKRRASSMDKIMNKLRLAQKKAQEMRSSVPHNQTDRVVRTSHKASSFLRTSQMRSLSGCFTCHVF

SEQ ID NO: 30789 - protein, 210 aa, Glycine max
  unsure (1)..(210): unsure at all Xaa locations
  Clone ID: TF_GmC356_9.pep
ARGTNVSRATSRRDMATQMSPQGSSRSSPNLRPSFSASTPSTLPVTELRTAGSSKVDIRDVQVDEHVTVTRWSKKHRALFTGRGSEKVESWKKKNLPGENFPQNRAFGCRKAKKEKVSTQSSTWDVSETSKPAPKAKSEEAKISAWENLQKAKAEAAIRKLEMKLEKRRASSMDKIMNKRILAXKKAQEMRSSVSHNQTDRVVRTSPQGS

SEQ ID NO: 30790 - protein, 164 aa, Glycine max
  unsure (1)..(164): unsure at all Xaa locations
  Clone ID: TF_GmC356_6.pep
VWWVQRCGHQCVLCCFKEGHGNPDEPTGDVQVDEXLTVTRWSKKHRALFTGXRLRTSQKLEKRKSKHSIAKSEEAKISAWENLQKAKAEAAIRKLEMKLEKRRASSMDKIMNKRILAXRKAQEMRSSVPHNQTDRVVRTSHKASXFLRTSQMRSLSGCLTCHAF

SEQ ID NO: 30791 - protein, 611 aa, Glycine max
  Clone ID: TF_GmC44078_1.pep
MRMRELGFQERRSWRRRGGDTSPDSVIFTLESNLSLFSSASASVDRCSFASDAHDHDSLASEISLHLAAQDHDGDFAHSESWSGPDPDLDPNKRQQQRHADTDSDAAHTKHRRNRFSGKGEKAKVQKEEDSDGGDTEDGNQHLEFDSARNSFSLALKECQDRRSRSEALFKKHDRRRPASLDLNNAIGNGNVSSPHLGLSAMKKSTLCSRRSGSGTFPSPGTPNYLHATVAMQKGWSSERVPLHTSAARKQVGAALLPFNNGRTLPSKWEDAERWILSPVSGDGGTGRASLPAPQRRPKSKSGPLGPPGVAAVAYYSMYSPAVPLFEGANSRSFMAASPFSAAVSVPAAAADGLTASSGGSCGVLSTRTDPCMARSVSVHGCSQMHSQSSLPAQGEKFDGFKDAGTNVSPALSRRDMATQMSPEGSSCSSPSLRPSFSASTPPSLPLSEFTSLPFSKMDIRDVPVDEHVTMTRWSKKHRALFSGRGSENVDSWKIKESSSRSSSWDISEGSKTVSKAKRVEAKINAWENLQKAKAEAAIQKLEMKLEKKRASSMDKIMNKLRLAQKKAQEMRSSALANQPHHVPRTPHKAILFSRASQMGSLSGCFTCHAF

SEQ ID NO: 30792 - protein, 78 aa, Glycine max
  Clone ID: TF_jC-gmXLIB3563P059ca07d2.pep
PLFFGSVGDKKKRLYFHASSWFLTVPDARVFSVYYVGHKDICSLFMRQKRLSGVCIPSGLEAKRNLIIQSVYEFSFAR

SEQ ID NO: 30793 - protein, 81 aa, Glycine max
  Clone ID: TF_LIB3242-386-Q1-K1-A4.pep
KFSRQRKKLQNPGQLEPLQKRPWEGFKILIPFLGGGALGPRSKQKRKFWLKKFQGWFLKGGYGGAKRKGGPYEVCDKQNSL

SEQ ID NO: 30794 - protein, 77 aa, Glycine max
  unsure (1)..(77): unsure at all Xaa locations
  Clone ID: TF_4276934.pep
AKKALFEADLNKIXKELEKKKAEAAEKIKSKIAAIPKEVEERRAIIXAKKGEDFFKAEGQAAKYKATGPAPKKLLGC

SEQ ID NO: 30795 - protein, 85 aa, Glycine max
  unsure (1)..(85): unsure at all Xaa locations
  Clone ID: TF_uC-gmflLIB3260P014a10a1.pep
KTPVPADKHFSRGSFDRKISLADLDKEKELFYVNAWEERDNAKSDNRPYKHLSFIDAWENSXKAAFETELKKLDEQLEKKKAEFX

SEQ ID NO: 30796 - protein, 71 aa, Glycine max
  Clone ID: TF_uC-gmflLIB3260P018a07b1.pep
ADPTKIEEELEKNKAEAAEKIENKVATIHKEAEERRTIIEAKKGEDLLKAEEQAGEYGATGTATKKLLGCF

SEQ ID NO: 30797 - protein, 348 aa, Glycine max
  unsure (1)..(348): unsure at all Xaa locations
  Clone ID: TF_GmC356_4.pep
ECQDRRSRSEALLKRLXSLDLNNASGSGSLPRLQTLKKTSISSRRSGTATFPSPGTLNYRVAMHKGWSSERVPLHAGATRKHVLPFNNGKTLPSKWEDAERWILSPVSADGTGRASLNAPQRRPKSKSGPLGPPGVAYHSMYSPAAPVFEVGNGGSFMEGSPFTGDGLIICTSSLHALCSALGGPRLTESVIINAXQEDKFGGFKDVGTNVSRATSRRDMATQMSPQGSSRSSPNLRPSFSASTPSTLPVTELRTVGSSKVDIRDVQVDEHVTVTRWSKKHRALFTGRGSEKVESWKKELSTQSSTWDVSETSKPASKTRSEEAKISAWENLQKAKAEAAIRKLEVTS

SEQ ID NO: 30798 - protein, 386 aa, Glycine max
  unsure (1)..(386): unsure at all Xaa locations
  Clone ID: TF_GmC17975_1.pep
MKKSSSSSFQNLGSFPSPGAPYYRERNIRSQKGWCSERVSNSKLSTSASSISRRHTMAGLITTPFCGGRTLPSKWDEAERWICSPVSAYAESRSCSHAQLQRRPKSISGPIVPPGVASFYSNQGLVVRNLVVGSPFSTGVLAPVAVSVHHFDAHDGNVFGYDLDSGMQFSRPXINENGMVLSSLSTAEPRALTPDEKHDGTMNGENVASHSSRCDKGTQMSPGEIENDSHSSPKSCATSIVDQQQCHSSKLEVRDVEVDSQATIVRWSKRHATKLAKKDTLHSKDLREISAEAQASWDIDESNIDTSKLQREEAKIIAWENLQKAKAETAIRKLEMKLEKKRSSSTDKILNKLRRAQLKAENMRSSIPVQQSHQVSKCRIVRENRL

SEQ ID NO: 30799 - protein, 411 aa, Glycine max
  Clone ID: TF_GmC3689_1.pep
MKKSSGSSQKLGSFLSPGAPNYSEKSIGSQKGWSSERVLLQPSSSNIRNASVANLTPFNSGRTIPSKWDDAERWICSPVSGYSNNKTNSYAQLQQRRPKSKSGPIMPPGTGYYSNYSPTIPLRQGLVVKNFMMGGSPFSTGVLAPDAISLHHYYSHEAVFGHRYDFDNSMQCSSPLLNENSVALPSVSSAPMWSELLCDPSSPNSQDEKRKETKNADDVTSLSKCDKGTQMSPPETENDAPKSSPNSTMDQQNYLSAKLEVRDVEIDREATTVRWSKSHVPKLSLLPGIHSRKSSRTEAKASGLDIADSTLDSSKIQREEAKIVAWESLQKAKAEAEIRKLEMKLEKKKSSSMDKILNKLRRAQMKAEKMRNQITVQEGQQVSNTRKVFSFHKYAQIWSPRSCFGTHALHD

SEQ ID NO: 30800 - protein, 88 aa, Glycine max
  unsure (1)..(88): unsure at all Xaa locations
  Clone ID: TF_LIB4390-036-R1-N1-B12.pep
IPPKNIPALKKDGLPLFKTLGFKPGPLKKKKPEFGVKIKNKIPFVPHPPEGKRPMVXPQRGEKIFKAEEKVAKPRATGTSPKKALGGF

SEQ ID NO: 30801 - protein, 44 aa, Glycine max
  Clone ID: TF_uC-gmrominsoy183f05b1.pep
VNTQAEERRALVEAKRAEQIRKAKERAAKDRAAGSSTKKASGCF

SEQ ID NO: 30802 - protein, 55 aa, Glycine max
  Clone ID: TF_LIB3108-040-QI-K1-C4.pep
HASAHASAETQEVAEVKPTEGSVNRDAVLARVATEKRLSLIKAWEESEKSKAENK

SEQ ID NO: 30803 - protein, 329 aa, Glycine max
  unsure (1)..(329): unsure at all Xaa locations
  Clone ID: TF_GmC302979_1.pep
LLKQIRTKLTGAEEKNKADLGGSRDQKVTHRKPXSFKDKKKAQNWFQRQFSRTMSHDYDAEMELATFFAAAAFAIFSLEGSLIPQQKKKRETPLTRGKSKVDDTKPPISQFGGTSRQFSVDLKRPEKTMTPAPSMRRSSTFGEKVKSSTDGKKPEIQAPKRTTTFGDEHSVNTGEIKPETPLPRVAPPVHQQMPLRPPPPPLPPPPPPPIRQTSARPGTNGTKADAWEREELEKIKERYEKLLETIDSWEKRKKAKAIRKLNKHQHSESERKRAKVLKKYQDKMSYISQIAGGARAQAEERRRSXVLKAKEKKNIIRTTGKIPGPCSCF

SEQ ID NO: 30804 - protein, 85 aa, Glycine max
  Clone ID: TF_701100625H1.pep
WALISALDFSLSSQAFTLDNRFSFSNSSKTIFLSGIHLKPFFFTGSGIFSFSFSFSTITRALVSSAAAGTGVAPPPLSSRARSYS

SEQ ID NO: 30805 - protein, 198 aa, Glycine max
  Clone ID: TF_GmC1419_1.pep
MAELQTKVEPVTVPAPAPVDPEPPLAEAPPLEKKAVAVPPPVPAAAEETKALVVVEKENEKIPEPVKKNASGGSLDRDIALAEIEKEKRLSNVKAWEESEKSKAENKAQKQLSAVAAWENSKKAALEAQLRKIEEQLEKKKAEYGEKMKNKIALVHKQAEEKRAMVEAKRGEEILKAEEIAAKHRATGTSPKKAFGCF

SEQ ID NO: 30806 - protein, 540 aa, Glycine max
  unsure (1)..(540): unsure at all Xaa locations
  Clone ID: TF_GmC682_1.pep
MEYERIEKVQAGIISPSKLRMKLLGPLHHRKKDGSNSNSSRTSPSRIEDAEFVNSLLGSKNDNLDDEVTSPSLDVLSLKPSSDAVLDRRQNGQISYEPKETMPKENSDTGRVKMQHFQKVDTRSSSAIHAVRAIEDENLDYDSNASSSSFEFDKGERPGNNPATRPYXRPIPSKWNDAEKWIMNRQNIQANHSKKNTCHNQANRMPTNMGRVAPESGNYDHKLPTGKATETKRVDFCQPTSHMGFEKFSFVPSDAHSVSGQAHGRNPVVESLPQSKDLKDVNELGLCCSRSTDDQSVMPGIRSVAMRDMGTEMTPVPSQEPSRTATPVGSATPLRSPVSSMPSTPRTGAPAPTPLDNTTNEDSQFPVENGKRHLSEEEMKIKTRREIAALGVQLGKMNIAAWASKDEQEKNKSSPRDMSVQEQERIEFEKRAALWEEAEKSKHTARFKREEIKIQAWESQQKAKLEAEMRRIEAKVEQMRAQTHAKMVKKIAMARQRSEEKRAAAEARKNREAERTVAQTEYIRQTGRLPSSNYICCGWL

SEQ ID NO: 30807 - protein, 112 aa, Glycine max
  Clone ID: TF_GmC1419_2.pep
LFLFFYCVCLYVKKLLFSVNRAQKQLSAVAAWENSKKAALEAQLRKIEEQLEKKKAEYGEKMKNKIALVHKQAEEKRAMVEAKRGEEILKAEEINAKHRATGTSPKKAFGCF

SEQ ID NO: 30808 - protein, 183 aa, Glycine max
  Clone ID: TF_GmC129326_1.pep
MAELQSKSETAPAPAPVVAEVPSNDAVAKKASETGESKAIVSVSEKTPVPANKQSSRGSIDRDIALAEVEKEKKLSYVKAWEESEKAKAENRAQKHLSAIAAWENSKKAALEAELKKLEEQLEKKKAEYGEKMKNKVALVHKEAGEKRAMIEAKRGEEILQTEEMAAKYRATGTTPKKTIGCF

SEQ ID NO: 30809 - protein, 72 aa, Glycine max
  Clone ID: TF_GmC708611_1.pep
ASSWMKKVERKLEEKRARALEKMQNDVAKAQRKDEERKASAEAKRGTKVARVLEIANLMRAVGRAPTKRSFF

SEQ ID NO: 30810 - protein, 109 aa, Glycine max
  unsure (1)..(109): unsure at all Xaa locations
  Clone ID: TF_5820122.pep
QRFESEKRLALIRAWEESEKTKAENRAYKRHNAVVLWENSKKXCEAHLKRIEEKLDRNKAKCVEKMQNKVAEIHRTAEEKRAMIEAYKGEEFLEIEEKAAKFRTRGYSP

SEQ ID NO: 30811 - protein, 194 aa, Glycine max
  Clone ID: TF_GmC1744_1.pep
MTEEQSKKVAETESFPSNPAPEPVVVPKEDVAEEKSVIPQPSPSPADESKALVIVEKTSEVAEEKPIEGSVNRDAVLARVATEKRLSLIKAWEESEKSKADNKSHKKLSAISAWENSKKAAAEAELRKIEEQLEKKKAEYGEKLKNKIATIHREAEEKRAFIEAQKGEEFLKAEETAAKYRATGTAPTKLFGCF

SEQ ID NO: 30812 - protein, 67 aa, Glycine max
  Clone ID: TF_jC-gmXLIB3564P117ab02a1.pep
RIKKNLKKKRPKLQKKLKTKFVPFPRELKKKKPIIRPKKGKVFFRPKNQLPKNKPLGPVPKKPLGGF

SEQ ID NO: 30813 - protein, 94 aa, Glycine max
  unsure (1)..(94): unsure at all Xaa locations
  Clone ID: TF_jC-gmst02400020g01a1.pep
QRSNPGRWLRLTSRPSNPAPEPAVCAKEDVAEEKSAIDTPXPSSADEINAVVIAAKTSVAAEKKPIEGSAHRDAALARDATEXRLSLIKAWEES

SEQ ID NO: 30814 - protein, 270 aa, Glycine max
  Clone ID: TF_GmC1351_1.pep
FAWRWRTEIFSLSQHNLSLAIQNETTFVPPPSTARSVSMRDMGTEMTPIASQEPSRTGTPVRATTPMRSPNSSRPSTPPRASPASTLTDLHSDNLNLNMNELSEKELQMKTRREIMVLGTQLGKMNIAAWASKEEEDKDASTSLKTKAELPKSVVEARAAAWEEAEKAKYMARFRREEMKIQAWENHQKAKTEAKMRKIEVEVERIQGKAQDKLTNKLAAARHKAEEKRAAAEANRNHQAAKTEEQAEYIRRTGHVPSSYLSFSCCNWCS

SEQ ID NO: 30815 - protein, 69 aa, Glycine max
  unsure (1)..(69): unsure at all Xaa locations
  Clone ID: TF_9565963.pep
KAKPADVQADLQQIAEALQQKKVHVVDKITTTIAAIYKEXAETTVIIQVKKGEDLFKVEEXAVKYRATG

SEQ ID NO: 30816 - protein, 153 aa, Glycine max
  Clone ID: TF_GmC239_2.pep
GSQHVAETTRKCGNGEGSTSPCKRTHEDHQARKLSPLESRAMAWDEAERAKYMARFKREEVKIQAWENHQIRKAEMEMKKMEVKAERMKALAQERFTNKLASTKRIAEEKRANAQVKLNDKALRATERVEYIRRTGHVPSSFSLSFKLPSICW

SEQ ID NO: 30817 - protein, 138 aa, Glycine max
  Clone ID: TF_LIB3242-271-Q1-J1-H11.pep
MGEEVSSKTEPELHCVDSVPEEHNSSVQEKELEKPEPPNDKVTPPSPAAAQEVADHASKKDTEESLDKDAMLARVVTEKRLALVKAWEESEKTNAENRAYKRLSAVGFWEDSKKASVEAQLKKIEENLEKKKAEYVEK

SEQ ID NO: 30818 - protein, 190 aa, Glycine max
  Clone ID: TF_GmC989_1.pep
MGEEVSYKTEPESELHSVPQEHNSSAQEKELEKPEPPNDKVTPPSPVAAQEVADHASKKDTEESVDKDAMLAKVLTEKRLALIKAWEESEKTKAENRAYKKHSAVGLWEDSKKASVEAQLKKIEESMEKKKAEYVEKMKNKIAEIHRLAEEKKAIVEAQKREEFIDLEETASKFRSRGDVPRKFFACFGG

SEQ ID NO: 30819 - protein, 271 aa, Glycine max
  unsure (1)..(271): unsure at all Xaa locations
  Clone ID: TF_GmC80032_1.pep
MNNNPTTIIGSTTHGSEEEDEHITEIREIHALTPPPPRGRAWETVHTHRSSSLSVASEGGASSSENFSMSREFSALVLAGSSIDHDNSNNNNSNSPMNENNNSNSLLGRIREEDLMEETNPLAIVPDNHPLDPVPSSSSQGVRGGGAAREEHVSVQRVKKEEVDAKISAWQNAKVAKINNRFKREDAVINGWESEQVQKASSWMKKVERKLEEKRARPMEXMLNVIAKAHRKAEERRASAKAKRGSKVARVLEIASLMRAEERPPAKKSFL

SEQ ID NO: 30820 - protein, 160 aa, Glycine max
  unsure (1)..(160): unsure at all Xaa locations
  Clone ID: TF_GmC1419_3.pep
MAELQTKGEPVTVPAPVDPEPPLAEAPPLEKKAVAVPPPVPAAAEETKALVIVEKEKENEKIPEPVKKNASGGSLDRDIALAEIEKEKRLSNVKAWEESEKXKQNMVKKMKNKIALVHKQAEEKRAMVEAKRGEEILKAEEIAAKHRATGTSPKKAFGCF

SEQ ID NO: 30821 - protein, 96 aa, Glycine max
  unsure (1)..(96): unsure at all Xaa locations
  Clone ID: TF_uC-gmroLIB3259008h06a1.pep
HLSAIAAWEISTKAALVAELKKLEDLLEKKKAAYGEKMKNKVALVXKKHRSKGPLFXAQRGVKILQPKEKGAKFLSTRTPSKKNIGRLSIFKKFWF

SEQ ID NO: 30822 - protein, 205 aa, Glycine max
  Clone ID: TF_GmC6783_1.pep
MTEEQTKTAESESVTPPPAAAPSQAPPAAEAEHVPEAPKDVTEEKSVIPVPSSDDKPDESKALVLVEKTQEVAEVKPTEGSINRDAVLARVATEKRLSLIKAWEESEKSKAENKAHKKLSSVSAWENSKKAAVEADLKKIEEELEKKKAEAAEKIKNKIAAIHKEAEERRAIIEAKKGEDLLKAEEQAAKYRATGTAPKKLLGCF

SEQ ID NO: 30823 - protein, 57 aa, Glycine max
  Clone ID: TF_19271195.pep
IHGQRLYMTMEQRRYFREEYGIETWTFIQKLRDAVFMRVGLALYVINQDGCIKAALE

SEQ ID NO: 30824 - protein, 110 aa, Glycine max
  Clone ID: TF_LIB4167-010-Q1-N1-C2.pep
FVALIEFHHLCIYAFEEPFTGVEPWTFIQNLGEAVFIPAGCPHQVRNLKSCIKVALDFVSPENIQECIRLTEEFRSLPKNHKAKEDKLGVKKMCLYALRKAADDLEKLEG

SEQ ID NO: 30825 - protein, 62 aa, Glycine max
  Clone ID: TF_jC-gmXLIB3563P024bc05d1.pep
KLQVLKVGKISLYAASSPIKKVQKLVLAPKVGAEIVYGAPILTAMVSENYEKMVNRRQITCA

SEQ ID NO: 30826 - protein, 162 aa, Glycine max
  unsure (1)..(162): unsure at all Xaa locations
  Clone ID: TF_uC-gmflminsoy058h11b1.pep
FGPKTYIAYGIKEELGXGDSVTKLHCDMSDAVNILTHTAEVILTDEQHFTISKLKEAHRAQNEREQCAQERVADHLEDRPYKDNKEHIENKEVLEAKSMKKQPIEIDGNIFPNNVLERYTSPATENESMETGSALWDIFQREDSEKLETYLKKHSKEFRHTY

SEQ ID NO: 30827 - protein, 233 aa, Glycine max
  Clone ID: TF_GmC385_1.pep
MVEGMNFFRRVNRTSCISTEAKKVSSQSMDSNGECDFISDSDSGSALLLLGTVQTAELSEHDNPRNPFKSSKRHKNKFTEHLGAQWDVFRRQDVPKLIEYLERHYDEFSYTHDYHKKMVHPILDQSIFLDSTHKMRLKEEFKIEPWTFQQHVGQAVVIPAGCPYQIRNSKSSVHAVLEFVSPENVTEGIQLFDEVRLLPEDHKAKADMLEVKKMALHSMNTAIKEVRQLTSKT

SEQ ID NO: 30828 - protein, 216 aa, Glycine max
  unsure (1)..(216): unsure at all Xaa locations
  Clone ID: TF_LIB4366-001-Q1-K1-C4.pep
IPCPKVNDECNHGFLELRSILGQHFVSELVCKAKELVQAYKLQNVVKTADNFCSCLKLDRNTDVSYSNMRKAASREDLTDNYLYCPKAVDLQYKDLRHFQWHWEKGEPVIVSNVLECTSGLSWEPLVMWRALRHVTNTKRGQHLAEKTIDCLDWTEGEINIHQFFTGXYTNGRKDWLAWPQILKLKDWPPSNLFEEQLPRHCXEFISSLPFKEXTD

SEQ ID NO: 30829 - protein, 227 aa, Glycine max
  Clone ID: TF_GmC713485_1.pep
PRVRVHSLIDDDDRVYCDNCNTSIVNFHRSCPNPNCQYDLCLTCCMELRNELHCEEIPASGNERTDDTPPVTAWRAELNGGIPCPPKARGGCGTTILSLRRLFEANWVHKLIKNVEELTVKYQPPNIDLSLGCSMCHSFEEDAVQNSVRKAASRETSHGNFLYCPDAIKMEDTEFEHFQRHWIRGEPVIVRNVFEKGSGLSWHPMGMGRALFSLLGLHHLIPTFSHR

SEQ ID NO: 30830 - protein, 281 aa, Glycine max
  Clone ID: TF_GmC139142_1.pep
QIQEEQIEAKLLGKSSFEIEIHQSLCGDGERVYCDHCATSIIDLHRSCPNCSYELCLSCCQEIRDGSITPRAELKFPYVNRGYDYMHGGDPLPVPCDLETSEGHIEPSTVWNAKSDGSISCAPKELGGCGSAVLELRRILPDGWISDLEAKARNMLKIWEIEHTTLQQKEAVSSFTFLRKEAIREGINDNNIYYPESSNTQKEGLLLFQKHWANGEPIIVRDVLKQGTGLSWEPMVMWRALCENMVSEISSKMSEVKAIDCLANCEVWSRCPFGAEFEHLV

SEQ ID NO: 30831 - protein, 53 aa, Glycine max
  Clone ID: TF_LIB3051-035-Q1-K1-F2.pep
VRLADALRCVPNEHEAKLQVVEVEKISLYASSSSITELQKLVLDPTLVAQIGS

SEQ ID NO: 30832 - protein, 269 aa, Glycine max
  Clone ID: TF_GmC484_2.pep
MMQKAKANKEFEAKESHGDPQISSRGSSPDSSLGTKSSGLEIDSNQNKSIMDQGFEIYSSAEGNTANCKLPFNQNGDVSEKTHPGVLWDVFRRQDVPILTKYLKIHWKEFGKSDDLGNEFVEWPLYDGAIFLDKHHKRKLKEEFGVEPWSFEQNLGEAIFVPAGCPFQARNVQSNVQLGLDFLSPESVGDAVRLAEEIRCVPNEHEAKLQVLEVGKISLYAASSAIKEVQKLVLDPKLGAQIGYGDPNLTAMVSENYEKMVKRRQITCA

SEQ ID NO: 30833 - protein, 104 aa, Glycine max
  unsure (1)..(104): unsure at all Xaa locations
  Clone ID: TF_GmC4885_8.pep
VNVLTHIAEVKLDSDQLTVIEKLKQKHLEQEKRELLGDDQDGEANVDMLXNSSSTINALDRQNGALWDIFWRQDVPKLQEYLKKNFREFRHVHCCRLKQGKLLK

SEQ ID NO: 30834 - protein, 68 aa, Glycine max
  Clone ID: TF_LIB3139-086-P1-N1-A7.pep
MEWPACTDEYEKLIIRMNTPRVVIDNSVFSSATLVKVDSARRHGILLDAVEVLADLNLSIKKAYISAD

SEQ ID NO: 30835 - protein, 951 aa, Glycine max
  unsure (1)..(951): unsure at all Xaa locations
  Clone ID: TF_GmC484_1.pep
GIIPFASLPQFSNARSANVDYNALRIPDDLRYKRFDGMPLRCTSMSVTDKTVCEKHYIQAKKRAPNSGMRANIHKAKRKSQSLWLKXSDYVYMESKGDVFYVTLSSIGLTQKKLSKNQFRYEPERDAPRRGSSARRSSNLNDDDDDDDDDDVDGDADADVALYEEENWVSCDSPPDSSRKRSRRSLEANATTEYSDGTSAGSSDEDTGGQTCHQCRRNDRDRVTWCQRCDRRGYCDSCLSTWYSDISLDEIQRICPACRGICNCKTCLRSDNSIKVRIREIPVLDKLQYLHVLLSSVLPVVKQIHCEQSFEVELEKKLRGAEIDLPRIKLNSDEQMCCNFCRIPITDYHRRCPSCSYDLCLSCCRDLREATADHNKEPQTEQAKTSDRNILSKFPHWRSNDNGSIPCPPKECGGCGYSSLNLSRIFKMNWVAKLVKNVEEMVSGCRISNADGPPETGLNDLKLCQYSHREASDDNYLYCPASDDIKTDGIDNFRKHWKTGEPIIVKQVFDGSSISSWDPMVIWRGILETIDEKAKDENRMVKAIDCLDGSEIDIELAQFMKGYFEGLILENGWPQLLKLKDWPSPSASEEFLLYQRPEFISKLPLLQYIHSKWGLLNVAAKLPHYSLQNDVGPKIYISYGISDELGRGDSVTNLHFNMRDMVYLLVHTNEVKLKDWQRTKIEMMQKAKANKEFEAKESHGDPQISSRGSSPDSSLGTKSSGLEIDSNQNKSIMDQGFEIYSSAEGNTANCKLPFNQNGDVSEKTHPGVLWDVFRRQDVPILTKYLKIHWKEFGKSDDLGNEFVEWPLYDGAIFLDKHHKRKLKEEFGVEPWSFEQNLGEAIFVPAGCPFQARNVQSNVQLGLDFLSPESVGDAVRLAEEIRCVPNEHEAKLQVLEVGKISLYAASSAIKEVQKLVLDPKLGAQIGYGDPNLTAMVSENYEKMVKRRQITCA

SEQ ID NO: 30836 - protein, 808 aa, Glycine max
  Clone ID: TF_GmC484_3.pep
RVRASNLNDDDDDDDDDVVVDVDGDGDGDAALYEEENWVSYDSPPDSSRKRSRRSSEANADSDGTSAGSSDEDTGGQTCHQCRRNDRDRVTWCQRCDRRGYCDSCLSTWYSDISLDEIQRICPACRGICNCKTCLRSDNSIKVRIREIPVLDKLQYLHVLLSSVLPVVKQIHCEQSFEVELEKKLRGAEIDLPRIKLNSDEQMCCNFCRIPITDYHRRCPSCSYDLCLSCCRDLREATADHNKEPQTEQAKTSDRNILSKFPHWRSNDNGSIPCPPKECGGCGYSSLNLSRIFKMNWVAKLVKNVEEMVSGCRISNADGPPETGLNDLKLCQYSHREASDDNYLYCPASDDIKTDGIDNFRKHWKTGEPIIVKQVFDGSSISSWDPMVIWRGILETIDEKAKDENRMVKAIDCLDGSEIDIELAQFMKGYFEGLILENGWPQLLKLKDWPSPSASEEFLLYQRPEFISKLPLLQYIHSKWGLLNVAAKLPHYSLQNDVGPKIYISYGISDELGRGDSVTNLHFNMRDMVYLLVHTNEVKLKDWQRTKIEMMQKAKANKEFEAKESHGDPQISSRGSSPDSSLGTKSSGLEIDSNQNKSIMDQGFEIYSSAEGNTANCKLPFNQNGDVSEKTHPGVLWDVFRRQDVPILTKYLKIHWKEFGKSDDLGNEFVEWPLYDGAIFLDKHHKRKLKEEFGVEPWSFEQNLGEAIFVPAGCPFQARNVQSNVQLGLDFLSPESVGDAVRLAEEIRCVPNEHEAKLQVLEVGKISLYAASSAIKEVQKLVLDPKYANFRLVLAIALTWRPDRLWRS

SEQ ID NO: 30837 - protein, 250 aa, Glycine max
  unsure (1)..(250): unsure at all Xaa locations
  Clone ID: TF_GmC4885_4.pep
SALVLLYFSRSPLFASRFSRPAVDPQYKDLRHFQWHWEKGEPVIVSNVLECTSGLSWEPLVMWRALRHVTNTKHGQHLAEKTIDCLDWTEVLVKCRXEINIHQLFTGYTNGRSDWLAWPQILKLKDWPPSNLFEEQLPRHCAEFISSLPFKEYTDPHKGSLNLAVKLPNGSLKPDLGPKTYIAYGFPQELGRGDSVTKLHCDMSDAVNALTHIAEVKLDSDQLTVIEKLKQKHLEQEKRELLGDDQGWRN

SEQ ID NO: 30838 - protein, 90 aa, Glycine max
  Clone ID: TF_GmC4885_7.pep
SKIFQTSIPFYSSSLTESLQNKIKAQRPIHPKVNHPKLSEILLQIFLQLRDILSPKNIPESTICPRVRPRVRFKTCCLRSFNKRLNFSPR

SEQ ID NO: 30839 - protein, 105 aa, Glycine max
  unsure (1)..(105): unsure at all Xaa locations
  Clone ID: TF_jC-gmXLIB3563P053dh04a1.pep
IKQVINLIHEQTFYLTMEHYNKLKEDLGIQPWTFAQKRGYAVVNASGCPXQGRNRMSCIKVALNCVSSINVGECFSLTEELHPISMNHRSTDDYLEVKNKSLYAV

SEQ ID NO: 30840 - protein, 292 aa, Glycine max
  unsure (1)..(292): unsure at all Xaa locations
  Clone ID: TF_GmC19373_1.pep
PEMLKLKDXPPPDXFEDLWPGHCDEFIRSLPFQEYSDPRTGILNLAVKLPAHVLKPDMGPKTYIAYGIKEELGRGDSVTKLHCDMSDAVNILTHTAEVILTDEQHFTISKLKEAHRAQNEREQCAQERVADHLEDRPYKDNKEHIENKEVLEAKSMKKQPIEIDGNIFPNNVLEXIVHPIHDRCFYLTWEHNKKLNKELGVEPWTFEQKLGEAVFIPAGCPHQVRNLKSCTKVAVDFVSPENIHECLRXLTKKFRQLPKNHKAREDKLEIKKMIVYAVDQAVKDLKDLLKCS

SEQ ID NO: 30841 - protein, 367 aa, Glycine max
  Clone ID: TF_GmC2494_1.pep
MQFKTCTNDDYEKGRISAMHLMKDKFCSIYDQSDTRSVFDDLNLPTPQARVNQEHQKNYIEQSRFKSRCIHFEELPYYSGKNVSDLLFPQEQFSQHYFSVCGNGVDNTVLQDVTDTGGDFPLDESYGQDPDNDIGGYPNTSESHLPCTSTEDTKFVNGLNSLDTPCSDINVEKIESVKNDTSSNNFCQNDDHLETQYGSAVWDIFRRQDVPKLTEYLKKHHREFRHINNLPVNSVIHPIHDQILYLNEKHKKQLKQEFGVEPWTFEQHLGDAVFVPAGCPHQVRNRKSCIKVALDFVSPENVQECIRLTEEFRLLPKGHRSKEDKLEIKKMALYAADVAITEATKLMRGNDMSDEAKEVPQQHIFTK

SEQ ID NO: 30842 - protein, 77 aa, Glycine max
  Clone ID: TF_jC-gmXLIB3563P073dg09a1.pep
FWFQGFLNCANGSVFPISKMDLFQIFSQYWNILPAKNIPKNSRMCFLKDISILCERKFTIGRITFSTRINFKPLIHD

SEQ ID NO: 30843 - protein, 217 aa, Glycine max
  Clone ID: TF_GmC1074_1.pep
MENGGNLCDGKEVDQFYQPSGGIEVVVANEDGLSCGSDLKEIDKVKIIQESDLFRGDASEGALWDIFRRQDVPKLQEYLKKHFREFRHIHCCPLKQVIHPIHDQTFYLTMEHKKKLKEEYGIEPWTFTQKLGDAVFIPAGCPHQVRNLKSCIKVALDFVSPENVGECFRLTEEFRTLPINHRSTEDKLEVKKMTIYAMQEVITKLEKARSRQTIVPK

SEQ ID NO: 30844 - protein, 58 aa, Glycine max
  Clone ID: TF_uC-gmroLIB3259142b10a1.pep
WGQENIFLINFGGRYLVKKTFWKRWSKWEVLTKKFLWETQKGKPSFLRAFDFQIKIPT

SEQ ID NO: 30845 - protein, 112 aa, Glycine max
  unsure (1)..(112): unsure at all Xaa locations
  Clone ID: TF_GmC28720_5.pep
MQPNVISSKSSSDSENFAESQLVPKMPKQASEEPKKKKKVKLPLPLVPADNNQNASQPVRKCMHCEITKTPQWRAGPMGPKTLCNAXGVRYKTGRLFPXYRPAASHFLPIWH

SEQ ID NO: 30846 - protein, 115 aa, Glycine max
  unsure (1)..(115): unsure at all Xaa locations
  Clone ID: TF_GmC138242_1.pep
TPQWRTGPMGPKTXCNACGVRYKSGRLVPEYRPAASPTFVLTKHSNSHRKVXELRRQKEMVRSQQHHHQHQQQFLQHHXXXHHHYQHHQNMMFDVSNGDDYLXHQPVGPDFRQLI

SEQ ID NO: 30847 - protein, 67 aa, Glycine max
  Clone ID: TF_LIB3242-054-Q1-J1-C5.pep
VEALNGGAHSLRRSSHCQVHYTPQWITGPLGPNTLWNAGGVRLKSGRLFRECRPSCGPTVCDDLHCN

SEQ ID NO: 30848 - protein, 94 aa, Glycine max
  Clone ID: TF_18848585.pep
TPAARLPQDEDHNKPHRHQPRSGVTRFCWDLLHSNHNNNNITQSQGKSSITGSNNNNDSLLARRCANCDTTSTPLWRNGPRGPKVYHHIQSSYL

SEQ ID NO: 30849 - protein, 56 aa, Glycine max
  Clone ID: TF_15201384.pep
ANGDDCLLCATDNTPQWLNAPMGPKTLCNSRGGLVQTGLLVPHDTTAARPTLVLTK

SEQ ID NO: 30850 - protein, 144 aa, Glycine max
  Clone ID: TF_GmC1320_6.pep
DPCTNNRELRELGNQETREEHHVINRGLTFTRLGMRHQKGLSWITKLRNALQSSENKTRGQGHQAHRGLFLFPQHLPPLLLSLPRTSPSLPIPWVQLVLLSRVVSWWFCNQRNISFSHSHSDPSFPILFTRSICKQHHNFIIYQ

SEQ ID NO: 30851 - protein, 329 aa, Glycine max
  Clone ID: TF_GmC1320_1.pep
MKTGSMIFSLLHVPRFRIQSLANCWGETFHGFSTTCGNNSNVRLLGSRIYGLQGGQRKKWTRPITTNIEGKGSTKSKSIKHEILSETILANATVNVNKTQLDKSQEIQYCDIQQEIAENKDLSSYTVIVFDIETTGFSRENERIIEIALRDLQGGENSTFQTLVNPQCKVPNSHIHGITTHMVNQPGVPRMEDLIPILLQYVRSREKPGGDVIFVAHNARCFDVPFIINELRRYSVEIPPNWLFLDTLPLARELMKSGGTTLSSTSLAALRDLYGIKVDGSAHRAMVDVNALSLILSRLTSDLKLTLSDLVKKSFTESDIINSKNKKKN

SEQ ID NO: 30852 - protein, 96 aa, Glycine max
  Clone ID: TF_GmC1320_3.pep
MMDLKEWSSSSEELNVNRKCCADCKTTKTPLWRGGPAGPKTLCNACGIRYRKRRACWRKGELKKQKQKQKQRWKMLGEEEQAAVCLMALSCGFVFA

SEQ ID NO: 30853 - protein, 544 aa, Glycine max
  Clone ID: TF_GmC1115_1.pep
MGKQGPCYHCGVTSTPLWRNGPPEKPVLCNACGSRWRTKGTLANYTPLHARAENIDYEDQKVSRVKSISLNKNTEVKLVKRKQNYDNAASGGFVPDYSQGYQKVVDEDTSNRSSSGSAVSNSESCAQFGGPDASDLTGPAQSVVWDAMVPSKKRTCAGRPKPSSVEKLTRDLCTILHEQQSYFSASSEEDLLFESDTPMVSVEIGHGSILIRHPSSIARDEESEASSLSVDNKQCLMNEAYSFSSTIPMYSDRSGMNFSSHGVEKIKNSAGQIMQQEKLERDKSQLEKLQVHGNHDSPLCSIDLNDVVNYEEFMRNLTNEQQQQLLKYLPVVDTAKFPDSLRNMFNSFQFKENLIYFQQLLGEGVFNISLLGAKPEEWKTLERLALSNLSKSKWVEHYNFLKKCENKSGKSIGLGSTAMESSNVTTGKRMREHDSRNQNIPELKTTMRSPKRVIIKPPSCEVKEVVEEGSSFSPKSLFALPHGVGGLHMLDSFNFVGESSEDLLLEVPSNSSFPQAELLHPSLSYGARQVSTTSSSVHSPVTHP

SEQ ID NO: 30854 - protein, 239 aa, Glycine max
  Clone ID: TF_GmC5880_1.pep
HVTPNSLKPTFVFLLLFLLSFILLLMDMDVCRNISVSSSECQQELPTLDDLFCHQNTEVDFGMEWLSVFVEDCFSSRPSCLLPPSGGGVQTTSTSTKPSSGTIMQRPQQSHHCPLQNFAVPGKARSKRKRLSAPRTNKDPLSIWSHHLNPQNESLCSDPPLLKQAYWLADSELIMPKPKDEEQEEVVTKEDEKVINEVSKEIALGTLSLMRVAMVNNNQCQEGAHIAWLRGPHSGGQDH

SEQ ID NO: 30855 - protein, 303 aa, Glycine max
  Clone ID: TF_GmC332_1.pep
MEVAVAKALKPSLRREFIVQQMLCEDIFSLNANTVAAGEDFSVDDLFDFSNGSLHNEQQQEYDEGKQSLSASEDRGEDDCNSNSTGVSYDSLFSTELAVPAGDLEDLEWVSHFVDDSLPELSLLYPVRSEEANRFVEPEPSAKKTPCFPWEMKITTKARTVRNRKPSNSRMWSLGSPLLSLPSSPSSPSSCSSSVREPPAKKQKKQAQVQPVGAQIQRRCSHCQVQKTPQWRTGPLGAKTLCNACGVRYKSGRLFSEYRPACSPTFCSDIHSNSHRKVLEIRKRKEVAEPDTGLAQTQMVPTC

SEQ ID NO: 30856 - protein, 294 aa, Glycine max
  unsure (1)..(294): unsure at all Xaa locations
  Clone ID: TF_GmC332_2.pep
MEVAVAKALKPSLRSEFIVQKMHCEDIFSLNANTVAVGEDFSVDDLFDFSNGSLHNEHQQECDEEKQSLSASSQSQDRGEDDSNSNSTGVSYDSLFSTELAVPAGDLEDLEWVSHFVDDSLPELSLLYPVRSEEANRFVEPEPSVKKTPRFPWEMKITSKARSVRNRKPNTRVWSLGSTLLSLPSSPPTKKQKKRAEAQVQPVGVQIQRRCSHCQVQKTPQWRTGPLGAKTLCNACGVRYKSGRLFSEYRPACSPTFCSDIHSNSHRKVLEIXKRKEVAEPDTGLAQTQMVPTC

SEQ ID NO: 30857 - protein, 305 aa, Glycine max
  Clone ID: TF_GmC246_1.pep
MKDCWFFDNNFNGLSDESLDDVMDMELLDLPLDFEDVETDAVEEQDWDAQLKLLEDPPPPLGVFPLQQSSAFCGQTRNENAKLGSKSFSASLAKTVRPAYGKTIPVQKVSLKGKDLLQFQTNSPVSVFESSSSSPSVENSNFELPVIPTKRPRTKRRRLSNISLLYSIPFILTSPAFQKFQRMDFSKSDIQTQPSGELLCKFKKKQRKKDIPLPTNKIEMKRSSSQESVAPRKCLHCEVTKTPQWREGPMGPKTLCNACGVRYRSGRLFAEYRPASSPTFVASLHSNSHKKVLEIRNRATQVTVR

SEQ ID NO: 30858 - protein, 197 aa, Glycine max
  Clone ID: TF_GmC38139_1.pep
SHIQWKVFESSSSSSVENSTFDRPVIPVKRARSKRQRPSNFSPLFSIPLIVNLPAVRKDQRTAASDSAFGTNVAGNLSNKVKKQKKKDLSLLSDVEMTRSSSPESGSPRKCMHCEVTKTPQWREGPMGPKTLCNACGVRYRSGRLFPENRPAASPTFVASLHSNCHKKVVEMRSRVIQEPVRCSMLASSNLHGNSVG

SEQ ID NO: 30859 - protein, 333 aa, Glycine max
  Clone ID: TF_GmC5694_2.pep
MATVNPQPLQFEDPAIPVDDDDDDDDDDGGDDDAMDDLEDANVNSVNVAANAAASVNHEAVVAMPSRTSELTLSFEGEVYVFPAITPQKVQAVLLLLGGRDVQARVPAVEQPFDQSNRGMGDTPKRSNLSRRIASLVRFREKRKERCFDKKIRYSVRKEVAQRMHRKNGQFASLKESPGSSNWDSAQSSGQDGTSHSESVRRCHHCGVSENNTPAMRRGPAGPRTLCNACGLMWANKGTLRDLSKGGRNLSVEQSDLDTPIDVKPTSVLEGELPGIHDEQGSSEDPSKSNAADGSSNHAVNPSDEELPETAEHFTNVLPLGIGHSSTNENEQE

SEQ ID NO: 30860 - protein, 82 aa, Glycine max
  unsure (1)..(82): unsure at all Xaa locations
  Clone ID: TF_GmC166087_1.pep
MRPSISPTTDKAINSSPRFQNHQGLESRRYSQRSPRNNNGSSTPRVCSDCNTSTTPLWRTGPXGPKSLCNACGIRQRKARKA

SEQ ID NO: 30861 - protein, 257 aa, Glycine max
  Clone ID: TF_GmC1014_1.pep
VKVERERERGESKRRHSQRRHTRCSSSRQARTRHVALSLYLDLPSSTIHASALFSLQTPHSGPCSLATRSLPIDLLASTPNPHDLYPLLSPPGPAPHQRLPRITFTLSNHSSFLISYSTSPSSSALQWLLPPQSSHPFVYTQCQSIHARSVFPCQDTPALRIQYSALLNVPSQLSAVMAARHVERRSPKHDDAVHVVLPDGESWCAQGRIVEEFVMEQSVPPYLFAFAVGELGNREVGPRTRVYAEDGGAEWKGRRR

SEQ ID NO: 30862 - protein, 146 aa, Glycine max
  Clone ID: TF_GmC1014_2.pep
MAAVDPHSFTDSRQARTRHVALSLYLDLPSSTIHASALFSLQTPHSGPFYLDTRSLTIHSVIHPKTQTPIPFSLSDPDPIKGSLLSFTLSDHSSFLISYSTSPSSSALQWLLPPQSSHPFVYTQCQSIHARSVFPCQDTPALRIQY

SEQ ID NO: 30863 - protein, 96 aa, Glycine max
  unsure (1)..(96): unsure at all Xaa locations
  Clone ID: TF_GmC5231_1.pep
LDLTWYMHRLKSKDLSICHNMILLGSCIMKPNATXTEMMLXAVTWPNFTDVYPFAPIDQXKGYQEMFNNLSELLLDKFSLHSRLVVIRAHYLICQL

SEQ ID NO: 30864 - protein, 141 aa, Glycine max
  Clone ID: TF_GmC5231_2.pep
MSLLTRLDDESNLAAEKSQTKILKTKNIAARSLSKCKIDFLNSTQSGRDAKIWEKRCGHKDARIWERRCSHCDAIKTPQWRTGPFGRNTLCNACGIRFKAGKLYPEYRPFLQDHHLSIGQELQLETPLNGTNEDIYNWQIK

SEQ ID NO: 30865 - protein, 163 aa, Glycine max
  Clone ID: TF_GmC588513_1.pep
MMHHCCGSSQGHVMGTCTCGMYHSETSAYGSMLFSVPNNSEYDMYSSFTPSPSSVDCTLSLGTPSTRLTQDDDHDNDNKRHPHQRRSGVANFCWDLLHSKHNNNNTQSQSKSSSRGSSSNNNNNNDPLLARRCANCDTTSTPLWRNGPRGPKSLCNACGIRFK

SEQ ID NO: 30866 - protein, 239 aa, Glycine max
  unsure (1)..(239): unsure at all Xaa locations
  Clone ID: TF_GmC225547_1.pep
METIGSVDDLLDFSSDIGEEDDYDDKPRKACPSLNSKCAGPSLFNPLVQEFAEEELEWLSNKDAFPSVETFVDLSSIQPGTTKNQKSAPVLECSTGSSNSNNSTNSISLLNSCDHLKVPVRARSKSRSRHRPGLAENSSQQVWWRQPSNGTSKADEGMKISSIGRKCQHCGAEKTPQWRAGPSGPKTXCNACXVRFKSGRLVPEYRXCSSPTFHSDLHSNSXRRSRDEEAEQMGMDKCK

SEQ ID NO: 30867 - protein, 284 aa, Glycine max
  Clone ID: TF_GmC5880_2.pep
MNMDMCQNVSVSGECQQVQVFAPSCSSSLDDLFSAQNTEVDVELEWLSEFVEDCFSSPPSCVLVPIGVKTTSTSTNLSSGTLKRPQQQNESPLQNFAVPGKARSKRKRKRLSAPRTTKHTLSTWSQHFSTQNDGVSSDPPLLKQAYWLADSELIVPKKKDVEQEEEEGVVVVVKKEKLGDYCDDDEGDEINNNNSNNDDNVQHPIPRRCTHCLAQRTPQWRAGPLGPKTLCNACGVRYKSGRLLPEYRPAKSPTFVSYLHSNSHKKVMEMRMGVGVAVLSTDKK

SEQ ID NO: 30868 - protein, 92 aa, Glycine max
  Clone ID: TF_jC-gmXLIB3563P070ae11d1.pep
NNSNNDDNVQHPIPRRCTHCLAQRTPQWRAGPLGPKTLCNACGVRFKSGRLLPEYRPAKSPTFVSYLHSNSHKKVMEMRMGVVGVFSTDNNK

SEQ ID NO: 30869 - protein, 105 aa, Glycine max
  unsure (1)..(105): unsure at all Xaa locations
  Clone ID: TF_GmC103141_1.pep
MAKKINSRGKKRTASDGGAARRCSHCGVQKTPQWRXGPLGAKTLCNACGVRYKSGRLLPEYRPACSPTFSSELHSNHHRKVLEMRRKKEDVPEPDTASPPSLPGF

SEQ ID NO: 30870 - protein, 70 aa, Glycine max
  Clone ID: TF_700678225H1.pep
MALVGEQKHSLMVKKGPCSHCGVTHTPLWHDGPTEKPVLCSDCGSQYKLKGNLDNYFPKNPVVQSFHNKF

SEQ ID NO: 30871 - protein, 326 aa, Glycine max
  Clone ID: TF_GmC767_1.pep
MRELKRLFRLTKGSSTAVSVSSLPSPLSFFSQQEQRKMEVAAAKALKPSLRTEFIFPQAIYDEILCFNANNVVAGEDFSVDDLLDFSNGEFQVGKDFDDYEEDEDEEKGSTSGSLQSQDRTEDDSNSNSTAGGGGDSVFAGELSVPADDVADLEWVSHFVDDSLPELSLLYPVRCSEQTRVCTEPEPRPGSVQTIPAVPRKPRTGKTRKPNARVWSSMSSLCSSVTAKKQKKKVEAQNGGAQSLRRCSHCQVQKTPQWRTGPLGPKTLCNACGVRFKSGRLFPEYRPACSPTFSDDIHSNSHRKVLEMRRKKEIVESDRIQLIPSC

SEQ ID NO: 30872 - protein, 122 aa, Glycine max
  Clone ID: TF_LIB4390-045-R1-K2-C5.pep
MPKPKDEEQEEVVTKEDEKVINVMSKESFGDSELEEGSNGQQPMPTRRCSHCLAQRTPQWRVGPLGPKTLCNACGVRYKSGRLLPEYRPAKSPTFVSYLHSNSHKKVMEMRMAVFSTISSEQ

SEQ ID NO: 30873 - protein, 99 aa, Glycine max
  Clone ID: TF_GmC241333_1.pep
MNQSVRPRTLAPRRCSHCGVQKTPQWRTGPLGPKTLCNACGVRFKSGRLLPEYRPACSPTFSSELHSNHHRKVLEMRQKKETVSVDETGFAPAHVVPSF

SEQ ID NO: 30874 - protein, 305 aa, Glycine max
  Clone ID: TF_GmC161373_1.pep
MEAQEFFQNTFCPQFPSDSNITPSNANPSAATTDHFLVEDFFDFSNDDDATFDSLPTDVDSPTVTPVDTTTNSNFPASADAHFPGDLSVPYDDLAELEWLSKFADESFSSEDLQKLQLITGVRAQNDAASSETRDPNPVMFNPQVSVRGKARSKRTRGPPCNWTSRLVVLSPNTKSSSSSHSGAEGGSEGRKCLHCATDKTPQWRTGPMGPKTLCNACGVRYKSGRLVPEYRPAASPTFVLTKHSNSHRKVLELRRQKEMVKVQHQQHQFLQLQHQQNMMFDVPSSNGEDFLIHQHVGPNFTHLI

SEQ ID NO: 30875 - protein, 237 aa, Glycine max
  Clone ID: TF_GmC5042_1.pep
MDLYGSFSTPSDCLHIDDFLDFSNITTDTHHHLPPPQNSPLISHDDANLFFNFPSVPTDEAAELEWLSQFVDDDATSFHSFPATASIGSHSTSFLSNNNNRNDNNEYPKSSLSSNIPCSSAVAGKSRARREGSVTGDGGVRRCSHCASEKTPQWRAGPLGPKTLCNACGVRFKSGRLVPEYRPAASPTFVLTQHSNSHRKVMELRRQKELLRHQQQQQLQQEQCHRHTHNHHDFKVC

SEQ ID NO: 30876 - protein, 101 aa, Glycine max
  unsure (1)..(101): unsure at all Xaa locations
  Clone ID: TF_LIB4392-031-R1-N1-G6.pep
MAGSSSPGSGPPPKCLPCGVPKTPPWREGPLGPQTLCNACGVXYRSGPLFFXFRPAASPPFVASLPPNCPKKVVGIRNKVFPGPVWGFLLASPPPPGNFVG

SEQ ID NO: 30877 - protein, 297 aa, Glycine max
  unsure (1)..(297): unsure at all Xaa locations
  Clone ID: TF_GmC1783_1.pep
RTRPIRLAPHTLYRSHTIHTPAANSDPHINSSSHTIEEHGAVSNHHIHYSSHTIEVDGGATVEEVSAVPPLEISINDSSQLTLSFRGQVYVFDAVTPDKVQAVLLLLGGNELTSGSQCAELSSQNQTGEEEYPAKCSLPQRAASLNRFRQIRXRRVAHKKVRYSVRQEVALRMHRNKGQFTSSKNQDGTNSWGSDQESGQDAVQSETLCTHCGISSKSTPMMRRGPSGPRSLCNACGLFWANRGTLRDLSKRNQEHSLAPPEQVDEGSNNNDFDCRSGIPAQHNNLVNDNKALVSDR

SEQ ID NO: 30878 - protein, 300 aa, Glycine max
  Clone ID: TF_GmC41398_1.pep
MDGIHGGDSRIHITDGQHPIHVPYVQEHEHHGLHHISNGNGIDDDHNDGGDTNCGGSESMEGEVPSNHGNLPDNHAVMMDQGGDSGDQLTLSFQGQVYVFDSVSPEKVQAVLLLLGGREIPPTMPAMPVSPNHNNRGYTGTPQKFSVPQRLASLIRFREKRKERNYDKKIRYTVRKEVALRMQRNKGQFTSSKSNNDESASNATNWGMDENWTADNSGSQQQDIVCRHCGISEKSTPMMRRGPEGPRTLCNACGLMWANKGILRDLSRAAPLSGTIKNENKSLEANQIVHRVAGEADDSS

SEQ ID NO: 30879 - protein, 185 aa, Glycine max
  Clone ID: TF_GmC1271_1.pep
MISNSKQIKNEEKNPPLTPLGTDDSNNYNSSANHSNITVRVCSDCHTTKTPLWRSGPKGPKTLCNACGIRQRKARRAIAVAATANGMNPVEAEKSQVKKGNKLHSKGMKSKTKGAPHMKKKRKLGAKYRKRFGAFEDLTVRLSKNLALQKVFPPDEKEAAILLMALSYGLLHGFPTDRYVNYLDL

SEQ ID NO: 30880 - protein, 321 aa, Glycine max
  Clone ID: TF_GmC356_2.pep
MQVDGFQPFHYANCSDEGEEAVPVTNASSAMHARASELTISFEGEVYVFPAVTPEKVQAVLLLLGAQEMTNSAPTSDILLQQNYQEKAEAAVRKLEMKLEKRRASSMDKIMNKLRLLGLNRMHRKNGQFASLKEDYKSPAENWDSSNGTPCPDSTERRCQHCGISEKSTPAMRRGPAGPRSLCNACGLMWANKGTLRDLSKAARIAFEQNELDTSADIKPSTTEAEHSFAKQDKEGSPEETKPVQMDSSRSPEKTNDQFIIGTAESVTDNLSIQVENHALSLHEQDTLEDLADASGTEFEIPAGFDDQVDIDDSNMRTYWL

SEQ ID NO: 30881 - protein, 128 aa, Glycine max
  Clone ID: TF_GM378C18.C60.o1.fg.pep
MWYVSQPNHQLLRHVFLHAQPQTTTLHDSDNIYDYSSFTPSSFSSVDCNLSLGTPSTCVSEDEEKRSRHECHSVSNFCWDLLQSKHNNPQSHSKSSGTTNTTDPLLARRCANCDTTSTPLWRNAPVAL

SEQ ID NO: 30882 - protein, 310 aa, Glycine max
  Clone ID: TF_GmC4231_1.pep
MEPSAMYGPSQPLNIPSRIGAGERDDGSGNEPAVDGHHHHIQYETHALDDGAAGGAVVVEDVTSDAVYVSGGGGPEESSQLTLSFRGQVYVFDAVTPDKVQAVLLLLGGCELSSGGSPCVDPGAQQNQRGSMEFPKCSLPQRAASLDRFRQKRKERCFDKKVRYSVRQEVALRMHRNKGQFTSSKKQDGANSYGTDQDSGQDDSQSETSCKHCGTSSKSTPMMRRGPSGPRSLCNACGLFWANRGALRDLSKRNQEHSLPPVEQVDGGNDPDCRTAAADPAQNNLAAFSEPVNPALVADRKVFQSQKMLE

SEQ ID NO: 30883 - protein, 310 aa, Glycine max
  Clone ID: TF_GmC4231_2.pep
MEPSAMYGPSQPLNIPSRIGAGERDDGSGNEPAVDGHHHHIQYETHALDDGAAGGAVVVEDVTSDAVYVSGGGGPEESSQLTLSFRGQVYVFDAVTPDKVQAVLLLLGGCELSSGGSPCVDPGAQQNQRGSMEFPKCSLPQRAASLHRFRQKRKERCFDKKVRYSVRQEVALRMHRNKGQFTSSKKQDGANSYGTDQDSGQDDSQSETSCTHCGISSKSTPMMRRGPSGPRSLCNACGLFWANRGALRDLSKRNQEHSLPPVEQVDEGNDSDCRTATADPAHNNLPAFSEHDNPALVADHKVFQSQKMLK

SEQ ID NO: 30884 - protein, 157 aa, Glycine max
  Clone ID: TF_GmC6848_1.pep
PQLPSLLHAPDPAAPPPHPVHGALSGIKAPKQASGEHKKKKKIKVTFPSGQERNAPSQAIRKCLHCEITKTPQWRAGPMGPKTLCNACGVRYKSGRLFPEYRPAASPTFCAAMHSNSHKKVLEMRNKTGTKSGFATVSAASPELIPNTNSSLTLEYM

SEQ ID NO: 30885 - protein, 299 aa, Glycine max
  Clone ID: TF_GmC1294_1.pep
MEVAAAKALKPSLRTEFIFPQAIYDEILCFNANNVVADEDFSMDDLLDFSNGEFQVGKDFDDYEEEEDEEKNSTSGSLQSQDRAEDDNNSNSTAGGGGHDYVFAGELFLPADDVADLEWVSHFVDDSLPELSILYPIHCSKKTRVWAEPESRLSPAQTVSKVPRKSRTEKPRKPNTRVWSSFTVFAGSVGFGELVTKKQKKKVEAQSGGAQSLRRCSHCQVQKTPQWRIGPLGPKTLCNACGVRFKSGRLFPEYRPACSPTFCGHIHSNNHRRVLEMRWKKQIAESVTGSDRKQLIPNY

SEQ ID NO: 30886 - protein, 324 aa, Glycine max
  unsure (1)..(324): unsure at all Xaa locations
  Clone ID: TF_GmC28720_1.pep
MVGPNFMDEIDCGSFFDHIDDLLDFPVEDVDGGAATLPSVSAGNSNSLASIWPSESDSFPTSDSVFSGNSASDLSAELSVPYEDIVQLEWLSNFVEDSFCGGSLTMNKVEEPSCTTKEDSVNTQFHTSSPVSVLESSSSCSGGKTFPLSSPEIYILWTYSSAQPXSYYVIPCISSKSSSDSENFAESQLVPKMPKQASEEPKKKKKVKLPLPLVPADNNQNASQPVRKCMHCEITKTPQWRAGPMGPKTLCNACGVRYKSGRLFPEYRPAASPTFCPSVHSNSHKKVLDTMQCMWGSLQVRPALPRIPACCKSNFLPIRALQFS

SEQ ID NO: 30887 - protein, 145 aa, Glycine max
  Clone ID: TF_GmC154925_1.pep
TRLLHLVAPEKEKPPQAKKREGTNVECSGRKCLHCGAEKTPQWRTGPMGPKTLCNACGVRFKSGRLVPEYRPAASPTFMSTKHSNSHRKVLELRRQKEMQRQQHHQQLMSQSSIFGVSNGGDEFSIHHHHHNHHLHCGPDFRHVI

SEQ ID NO: 30888 - protein, 124 aa, Glycine max
  unsure (1)..(124): unsure at all Xaa locations
  Clone ID: TF_LIB3242-152-Q1-J1-A8.pep
LISPASSTGENVQHNATTTSKAASSDSENFAESVIKGPKQASGEHKNKRKIKVTFSSGQEQQNAPSQAVRKCLHCEITKTPQWRAGPMGPKTLCNACGVRYKSGRLFPESRPAASPTXCAAVHS

SEQ ID NO: 30889 - protein, 124 aa, Glycine max
  Clone ID: TF_GmC7389_1.pep
EEAPLSWAPPAAPPQEPSFWHQLVHNALIPGTACFPQLLTPTRFGSPPVPGIPPHAMYKADHDIGLPGPLFDFYPSKECIDAAIGDVLSKPWLPLPIGLKAPALDSVMSELQRQGIPNIPPSSA

SEQ ID NO: 30890 - protein, 75 aa, Glycine max
  Clone ID: TF_GmC46996_2.pep
TAARRRQKGVCGCKTSLVGPDTETLSVTSHSQTMPYPWLSLTPNSSTRVRIAARGRGSDGNPHLCGCMRFQFQFQ

SEQ ID NO: 30891 - protein, 116 aa, Glycine max
  Clone ID: TF_9902941.pep
YCFFLGVGATPKLVLQLMNIKSLSIAHVKSHLQMFRSKKVDDRNQVFADHNSLVETGDKNIYNLSQLSMLQGYNPSQSSSFSYTNNYPSYGFGDASFGVYEKLLQRPFDWSNAISS

SEQ ID NO: 30892 - protein, 171 aa, Glycine max
  Clone ID: TF_GmC12582_2.pep
MCIRLLGATPKSVLELMDVKDLTLAHVKSHLQMYRTVKTTDKPAASSGLSDGSGEDDMSPMGSSGGMRQFSDQRSLSDRPVQQDMDYSSGNNTLWSNSSSSRETWQQNNSNDVDGFRPPIFQSQQISGGHQIQECDSTQLKNSLSGSNLECKNPSLEFTLGRPDWNGKGQA

SEQ ID NO: 30893 - protein, 54 aa, Glycine max
  Clone ID: TF_uC-gmroLIB3259P231e09b1.pep
ELMQGDGLTNDQGKSHTQKYRVHTRTDAAACSNHTVVSSWRLVDVIRSMTQTTI

SEQ ID NO: 30894 - protein, 90 aa, Glycine max
  Clone ID: TF_GmC391586_1.pep
MGESSGSQCSKTSPSNIDEDDEGESEANEDQSKQNNNGGSSSNSTVEENEKKIRPYVRSKMPRLRWTPDLHLRFIHAVQRLGGQERATPK

SEQ ID NO: 30895 - protein, 35 aa, Glycine max
  unsure (1)..(35): unsure at all Xaa locations
  Clone ID: TF_LIB3139-043-P1-N1-G4.pep
KTTPNVVLKLIKVXRLTIYHVKSHLQKYMTARYIL

SEQ ID NO: 30896 - protein, 51 aa, Glycine max
  Clone ID: TF_LIB4164-049-R1-K1-H3.pep
VCLLTLAGATPKSVLELMNVKDLTLAHVKSHLQMYRTVKSTDKGITAAGRL

SEQ ID NO: 30897 - protein, 68 aa, Glycine max
  unsure (1)..(68): unsure at all Xaa locations
  Clone ID: TF_GmC38886_2.pep
MVPHKSQGGVEQLANAGVLGGSAVKIAAAPAGGSGKQRLRWTSDLHDRFVDAITQLGGPDXWGISFQY

SEQ ID NO: 30898 - protein, 41 aa, Glycine max
  Clone ID: TF_LIB3092-044-Q1-K1-A2.pep
GIHSSTPKHFRELMHVGGLGNDELKSHVQKYLLYTQRVPVA

SEQ ID NO: 30899 - protein, 103 aa, Glycine max
  Clone ID: TF_LIB4391-037-R1-K1-G3.pep
MYSTHQQHQGKNIHSSSSSSRMPIPSERHMFLQTGNGSGDSGLVLSTDAKPRLKWTPDLHARFIEAVQQLGGADKATPKTVMKLMGIPGLTLYHLEEPSPGKN

SEQ ID NO: 30900 - protein, 88 aa, Glycine max
  Clone ID: TF_jC-gmro02910037d06a1.pep
AAPNAIMPTMNVMGLTMVDLTSHLAKYRLGKQSWKDAVEGCKDGMMANPMCGSNMFSSLTPEYTLRPMRSAVAFTTPLTTERGVHLEL

SEQ ID NO: 30901 - protein, 115 aa, Glycine max
  Clone ID: TF_GmC59217_2.pep
MYHHHQHQGKNIHSSSRMPIPSERHMFLQTGNGSGDSGLVLSTDAKPRLKWTPDLHARFIEAVNQLGGADKATPKTVMKLMGIPGLTLYHLKSHLQKYRLSKNLHGQNNNVTYKN

SEQ ID NO: 30902 - protein, 140 aa, Glycine max
  Clone ID: TF_GmC200_2.pep
NPRKQRRCWSPDLHRRFVDALQQLGGPQVATPKQIRELMQVVGLTNDEVKSHLQKYRLHFKRPQGSSIGHANSGLCKMAQDKCGDDKSGSPQGPLFLGGSGKGLSSSGRNSMDTEGDEESDCRNWKGGIHHQLQPESDVL

SEQ ID NO: 30903 - protein, 202 aa, Glycine max
  Clone ID: TF_LIB4392-010-Q1-K1-A2.pep
QIIKHDDKECLDPSSTKKARVVWSVDLHQKFVKAVNQIGFDKVGPKKILDLMNVPWLTRENVASHLQKYRLYLSRIQKENDQRSSSSGLKHSDFPLKDMRSFGFQNSVNNQQQNDVAIDSYNHSDGSLLLQNVETKSHEADPKGIVSQSTIAKKGRILTGNIADTNMRESLRVGLNQTFAPLESEENHAVFDCSMPTPYTWT

SEQ ID NO: 30904 - protein, 61 aa, Glycine max
  Clone ID: TF_jC-gmst02400044h05a1.pep
MYSRLIHPHDGIVTQDDLQGAASNLSHAHKGDPCLVLTADPKPRLRWTQDLHERFVDAVTQ

SEQ ID NO: 30905 - protein, 161 aa, Glycine max
  Clone ID: TF_GmC13720_2.pep
LVWTPQLHKRFVDVVAHLGIKNAVPKTIMQLMNVEGLTRENVASHLQKYRLYLKRMQGLSNEGPSSSDQLFASTAVPQSLHDSAPPSAHSNGHGHLPVPMMSMPYPPPMMSMPYPPPMMSGMPHAHGHMGIPMPNSSATSAYHPYNMLHQRDWPHLAPNDK

SEQ ID NO: 30906 - protein, 471 aa, Glycine max
  Clone ID: TF_GmC345_1.pep
DNEDPSTQKKPRVVWSVELHRKFVSAVNLLGIDKAVPKKILDLMNDEKLTRENVASHLQKYRLYLKRISCGANRQANMVAALGTADSSYLRMGSLSGVGHLQTLTGPQQFHNNAFRPFPPGGMIGRLNTSVGLNNHGLSSSEALQLSHAQNLNNSINDPLKFQSSIACGNQNAIQGMPMSIGLDQLQHNKGVSVSVGPIQNMSPLIDARPTFAVSNRLSDQIPKVTMGCSPSPVLDVSNNALVLKADSENTQGRGVYENLTSVASQHSQFSLPLLGHGRCSDIWSSPMRSSGTNSYPPSETLQGGNLSGASSITSLSNQSHDSQTDMHSQGLIFTNNSGQISNNVPFLGWDDHNHDSSYHSNVIGNSIDSLIDPEGHTSINSTYNRNLDFNFCDPLQMKHDGIMGLSDENSLKQQHRYIMNQQKSQNSRAPNNIGSLEDFVSSMMKQKQDKVKFLDGSYLCNNNYPDGTSM

SEQ ID NO: 30907 - protein, 54 aa, Glycine max
  Clone ID: TF_LIB3109-005-Q1-K1-H1.pep
MERMFPPKKPSTMNSHDRPMCVQGDSGLVLTTDPKPRLRWTVELHERFVDACTQ

SEQ ID NO: 30908 - protein, 318 aa, Glycine max
  unsure (1)..(318): unsure at all Xaa locations
  Clone ID: TF_GmC12007_1.pep
QDDTDTHSSHLTSSGAVGHMFSSSPGYSTDLHHSSFSSHEKQPRNTHFISQSLSNMASLPLSYSSNSEPIPSTTSTPYSNGNSVSWHTDSLPSFLDFPANTSIGNSQVESSDCNIMATEEYSKRNDWQEWADQLISDVDPLTSNWNDLLADNIQDLEPKVAKSSSQLPIGHQSQSHQQLPASSGENRVGVAPTSSTNSAPAKPRMRWTPELHEAFVEAVNQLGGSERATPKGVLKLMKVDGLTIYHVKSHLQKYRTARYRPESSEGAMEKKPSPIEEMSSLDLKXGIEITEALRLQMEVQKRLHEQLESQSGVSSTHA

SEQ ID NO: 30909 - protein, 213 aa, Glycine max
  Clone ID: TF_GmC60412_1.pep
MKNSERSSVRKYNKSELPRLRWTPELHQHFVEAIQSLGGSHKATPKRILQQMRVKGLRIAHIKSHLQMYRNMKGHAIVAPVDQLLEGKAKDFKICSNICPTERNLKRELHLLDYKDGLSQTSEETDYDLNQEPQSSAVLLLSDDVSNEEENFADLSLISFSMPLISMMQSENNKEIMRFLSSTAAAAANHSVVDSSFFTPSFANNYINLDLTI

SEQ ID NO: 30910 - protein, 275 aa, Glycine max
  Clone ID: TF_GmC247294_1.pep
MREEDSNWFSRWEEEFPSPEELMPLSQTLITPDLAMAFDIRNPHTTNTAQQQHHHHQQQPQQQQQPSNPSSLPNPLQQQQQQQQPTSAEFADSGELGSGTAGEEPARTLKRPRLVWTPQLHKRFVDAVAHLGIKNAVPKTIMQLMSVDGLTRENVASHLQKYRLYLKRMQGISAAGPGGPGGGASGAVADPATDHLFASSPVPAHFLHPAARPNSDHFLPFVPALHPHQQQQQMAAAAQYHRQVRHFGSPPNGHFENPFMSRPHLQRLGGGGGGG

SEQ ID NO: 30911 - protein, 194 aa, Glycine max
  Clone ID: TF_GmC27103_2.pep
MNRLSLLTPSSVKEGCGSRGSRSSSNRAVSSSSPPMVQPSLRATSLQQTARKQRRCWSPELHRRFVNALQKLGGSQVATPKQIRELMQVDGLTNDEVKSHLQKYRLHTRRVPAASSNQPVVVLGGLWMSQDQYNDSSKVSSSGSGSPQSPLHLAAGSRGGTSPTEGDSMEDDEDARSESFSWKSHMHKAGKVDV

SEQ ID NO: 30912 - protein, 373 aa, Glycine max
  Clone ID: TF_GmC1389_1.pep
MERMFPPKKPSTMNSHDRPMCVQGDSGLVLTTDPKPRLRWTVELHERFVDAVTQLGGPDKATPKTIMRVMGVKGLTLYHLKSHLQKFRLGKQPHKDFNDHSIKDGMRASALELQRNTGSSSAMIGRNMNEMQIEVQRRLHEQLEVQKHLQLRIEAQGKYMQSILEKAYHTLAGENMASAATNLKSAIVPHHQGIPDMGVVMKEFGSPLGFSSFQDLENIYGGNQIDLQQNMEKPSLDHGFMPINESLCLGKKRSNNPYSGSGKNPLIWSDDLRLQDLGGPASSCLGPQDDPFKGDQIQIAPPGSLDRGASTDIDPMSEIYDSKPVLQSEEKKFDASSMKLERPSPRRAPLQPERMSPMISTGTMAQGRGSPFG

SEQ ID NO: 30913 - protein, 319 aa, Glycine max
  Clone ID: TF_GmC6799_2.pep
MGLVVPEEELSLDLRPSFVPKTITDFLCHLSTTPNASHKVSLLDDFVHRLELELAKIQAFKRELPLCMFLLNDAISALKVESEKCRACKSEPVFEEFIPLKKECDQRKEIEKEKECRDKKNWMSSFQLWNNDDKADNNNNAYECDKKHNYRVENKNNGEKRKSVLEPLFQYGRIRNGEKGFVIPFSSYPATKEEKEDCVANGLSLQTPGTAVKSTREGSGCRTSSCRVGSSAPSPLHQPQSSRKQRRCWSPELHSRFIKALEVLGGSQATPKQIRELMRVDGLTNDEKYRLHTQRVPVATSCKFSRSAVDLEACGCTMN

SEQ ID NO: 30914 - protein, 238 aa, Glycine max
  Clone ID: TF_GmC38886_1.pep
MYHTKKFSPASMVPHKSQGGAEQLANAGVLGGSAVKTAAPSGGSGKQRLRWTSDLHDRFVDAITQLGGPDRATPKGVLRVMGVPGLTIYHVKSHLQKYRLAKYLPESPADDPKDEKRMSGDSISGADSSSGMPINDALRMQMEVQKRLHEQLEVQKQLQMRIEAQGKYLQKIIEEQQKLGSTLTTSETLPLSHDKQNHPQSEASGSSDALASTVSPLKKQRIDDGSKEGFTASQVRKE

SEQ ID NO: 30915 - protein, 98 aa, Glycine max
  Clone ID: TF_GmC161288_1.pep
KNAVPKTIMQLMSVDGLTRENVASHLQKYRLYLKRMQGLSAGGGVGRVASAELTNERLFPSRPWRRLTAAAGSDHYCQFVHSGSHITKRGNSTTFGRA

SEQ ID NO: 30916 - protein, 376 aa, Glycine max
  Clone ID: TF_GmC594_1.pep
MAVENQREDGGCDRFPVGMRVLAVDDDPICLKVLENLLRKCQYHVTTTNQAVEALTMLRENRNKFDLVISDVNMPDIDGFKLLELVGLEMDLPVIMLSAHGDTKLVMKGVTHGACDYLLKPVRIEELKNIWQHVVRRKNFDSRDQNKASNEEKAPNFAGGGSQGLRSENSADQNKRLGKKRKDQSDEEEEGGEENEDDEDPSAQKKARVVWSVELHRKFVAAVNQLGLDKAVPKKILDLMNVEGLTRENVASHLQKYRLYLKKAAQQANMVAALGGSDSYLRMGSIDGYGDFCTSSGSGRITNTTLPSYASTGIFSRLNSPAALNMRAISSSALIRPVQSQNINCSLNTLGNIQPSIFPANHQVPGITWNSNINLA

SEQ ID NO: 30917 - protein, 313 aa, Glycine max
  Clone ID: TF_GmC381_3.pep
MYSRLIHPHDGIVTQDDLQGAASNLSHAHKGDPCLVLTADPKPRLRWTQDLHERFVDAVTQLGGASKATPKAIMRTMNVKGLTLFHLKSHLQKYRLGKQSGKDVGEGCKDGSYLLESPGADNSSPKLPTSDTNEGYEIKEALRAQMEVQSKLHLQVEAEKHLQIRQDAERRYMAMLERACKMLADQFIGATVIDTDSQKFQGIGSKAPRGTLVDPLGFYSMPSTEVAGVNVPEEEIPLSLPPQRADCSTESCLTSHESSGGLALEGSPGEGKRRMLGMDSMAAPLIWSEAKMRTQAINVAQGNLPQGITRYGM

SEQ ID NO: 30918 - protein, 222 aa, Glycine max
  Clone ID: TF_GmC381_5.pep
MYSRLIHPHDGIVTQDDLQGAASNLSHAHKGDPCLVLTADPKPRLRWTQDLHERFVDAVTQLGGASKATPKAIMRTMNVKGLTLFHLKSHLQKYRLGKQSGKDVGEGCKDGSYLLESPGADNSSPKLPTSDTNEGYEIKEALRAQMEVQSKLHLQVEAEKHLQIRQDAERRYMAMLERACKMLADQFIGATVIDTDSQKFQGIGSKAPRGTLVDPSWVLLHA

SEQ ID NO: 30919 - protein, 192 aa, Glycine max
  Clone ID: TF_LIB4164-003-Q1-K1-D8.pep
MDPRLIHPHDGIVTQDELQGGAASNLSHAHKGDPCLVLTADPKPRLRWTQDLHERFVDAVTQLGGASKATPKAIMRTMNVKGLTLFHLKSHLQKYRLGKQSGKDVGEGCKDGSYLLESPGADNTSPKLPTPDTNEGYEIKEALRAQMEVQSKLHLQVEAEKHLQIRQDAERRYMAMLERAWQMLADQFISAT

SEQ ID NO: 30920 - protein, 91 aa, Glycine max
  Clone ID: TF_GmC804873_1.pep
MPSSPTTTSSLHYNGDGDVNDKEDNDDTDCKDSRSDSRTETSAKRTTVKRLQLVWTLQLHKTFVDLVAHLPIKGAVPKTIMQLMNVEGLSL

SEQ ID NO: 30921 - protein, 519 aa, Glycine max
  unsure (1)..(519): unsure at all Xaa locations
  Clone ID: TF_GmC942_2.pep
MVCTANDLQGWKDFPKGLRVLLLEGDSSSAAEIREQLEAMDYKVSTFYDENEALSALSSSPKGFHVAIVEVSTSCSLGGFKFLENAKDLPTIMTSKDQCLNTMMKCIALGAVEFLSKPLSEDKLKNIWQHVVHKAFNSGENVLSESLKPVKESVESMLQLQTDIGQDKSRISIDLENVSRFSDNDHEQSAVCDKYPAPSTPQLKQGTRLLDDGDCHEQTNCSTEKESGEHDRECKSVETSCGNLNAESSPQPREPDKTLIREEDDFANVSKGESAVSLNPHNKKFLSNADGNTSPNKTGVLNDSCEIKANRKKVKVDWTPELHKKFVKAVEQLGIDQAIPSRILEIMKVEGLTRHNVASHLQKYRIHKXQRIRLEEDRKWHNQGDAMQRNYYMQRPIMAYPPYHSHHTLSPAPIYPMWGQPGSQTAGVQIWGHPGYPMWHPTESWHWKPYPGVHVDAWGCPLVPPPQAPCFPYNQNTPGLHNPKAVDYRFSMPRSSFEHHPVRQYFPFSSFYHVMNFFL

SEQ ID NO: 30922 - protein, 209 aa, Glycine max
  Clone ID: TF_GmC1335_2.pep
MYHSKNVPSASLIGGNSLSHGQHIDCGGSTMDPGSGGNGLSNNSNLTSKQRLRWTHELHERFVDAVAQLGGPDRATPKGVLRVMGVQGLTIYHVKSHLQKYRLAKYLPDSSSDEGKKADKKETGDMLSNLDGSSGMQITEALKLQMEVQKRLHEQLEVQRQLQLRIEAQGKYLKKIIEDNSGLSGVLSEAPGFGVCSGCSQGMHAKNLI

SEQ ID NO: 30923 - protein, 278 aa, Glycine max
  Clone ID: TF_GmC242282_1.pep
MAPCAAAAEFPVGLRVLVVDDDATTLKIIEQMSIRCRYRVTTCTEATVALNLLRERKGCFDVVLSDVHMPDMDGYKLLEHVGLEMDLPVIMMSGDSTTSAVMKGIRHGACDYLIKPVREEELRNIWQHVVRKFWNDSKEQDNSGSMEDSDQNKRGNDDAEYTSVADAAVVKAPKKRSSLKEEDIELESDDPAASKKPRVVWSVELHQQFVSAVNQLGLDKAVPKRILELMNVPGLTRENVASHLQKFRLYLKRLTGVAQHQNGMLYTVPGPIRIQSGN

SEQ ID NO: 30924 - protein, 334 aa, Glycine max
  Clone ID: TF_GmC16929_1.pep
MDLQNVQNQSMMRLVLSTDAKPRLKWTPELHQRFTEAINQLGGAEKATPKSLMRVMGIPGLTLYHLKSHLQKYRLGKSQPLETCSDNKQQGYSEIQNSDGHCSKEISIGTQNQMTESLKIAEALQMQMEVQRKLYEQIEVQKHLQLRIEAQGKYLQSVLTKAHEALARHSSSTTGVELAKFELSLLVSIINNACPSSPISELTETRGLSLNCGERKQDRGTMCSLESSLTSSESSEQQHIMDEAENPQKFDGVSVELPLISIHPAEVKAFKGDTSVDGRKRSAETDSDHCVDQACGKKKLRKSEVSQMLDLNSQYQRDIDSSVKEIDLNFSSSF

SEQ ID NO: 30925 - protein, 191 aa, Glycine max
  Clone ID: TF_GmC795_2.pep
RNTIRSRRAPRMRWTSTLHARFVHAVELLGGHERATPKSVLELMDVKDLTLTYVKSYLQMYRTVKTTYRAAASSGQSDVYDNGSSGDTSDDLMFDIKSSRRSDLSVKQGRSSVNQDKEYHGLWGNSSREAWLHGKTKTDSVGNVPFSLEKEMDPKCLSYERISDGSSSSNLSGSSPKKPNLDLEFSLGQPL

SEQ ID NO: 30926 - protein, 678 aa, Glycine max
  unsure (1)..(678): unsure at all Xaa locations
  Clone ID: TF_GmC683_1.pep
MNLSNGKGSMSTLTASVVMKSGDAVSDQFPAGLRVLVVDDDPTCLMILEKMLRTCLYEVTKCNRAETALSLLRENKNGFDIVISDVHMPDMDGFKLLEHIGLEMDLPVIMMSADDGKSVVMKGVTHGACDYLIKPVRIEALKNIWQHVVRKRKNEWKDAEQSGSAEEGDRQPKASDEADYSSSANEGSWRNSKKRRDEEEEGXDDSSTLKKPRVVWSVELHQQFVAVVDQLGIDKAVPKKILELMNVPGLTRENVASHLQKYRLYLRRLSGVSQQQGNLSNSFMSSQEATFGGTSINGIDLQTLSAAGQFPSQSLAKFQAAGLGRTTAKAGIPMSLSDQKNLFSFENPRLRFGEGSLTHMDIRKPKNLLHGILTNMEPKQLANLHQSTQPLGSLNMRVNSPATQNKPLLMQMTQAQPKGQLLSENVNTNXTRYPSSLLQTTEEEDLSTGVSGNAIACSRNITTTYNPVQQKSSLVKVAMNRDDKSTAKKPQVVRSLEIHRKFVAALFQQEGTSGVKESVVLFKSYDMFNDLHHQKSHDWDLTNTGMTYDASQHAKPSQTTLFSAPQDAIHESFSSMQETDLHTDTTSIGKAMFSTGEGMHQSSLQNIGQHRAITFFXDNSVRVKAERIPDPSCQINNLFSDQYGQEDLVSAFLKQQEGVGTAENEFDFDGYSLDNIPV

SEQ ID NO: 30927 - protein, 100 aa, Glycine max
  unsure (1)..(100): unsure at all Xaa locations
  Clone ID: TF_LIB3109-028-Q1-K1-G3.pep
NGSGDSGLVLSTDAKPRLKWTPDLHARFIEAVQQLXGADKATPKTVMKLIGIPGLTLYHLKSHXQKYRLSKSLHGQSNNMTHKITINSGAATDERLRENN

SEQ ID NO: 30928 - protein, 412 aa, Glycine max
  unsure (1)..(412): unsure at all Xaa locations
  Clone ID: TF_GmC27103_1.pep
MGSVAAEELNLDLRSSFVPKTITDFLRHLSANNNHPATLRDFLSRLEDELRKIHAFKRELPLSMLLLNDAISVLKVESQKCCRVARDSPPVLEEFIPLKKELGDQSEEEEENDDDKDDNECRDKRNWMSSVQLWNNNTTTTTTNNNNNASDRKQLLHKLQTKKSEEGQSVAEDPFQTCSNRNGGRRAFMPFSRYSSSSSSVPVTTVGLGAASKEEKEESVRNRLSLLTPSVKAWCGSRGSRSSSIRAVSSSPPTAQAGFACXSVPKPKQIRERCWSHELHRRFVNALQKLGGSQAATPKQIRELMQVDGLTNDEVKSHLQKYRLHTRRVPAASSNQPVVVLGGLWMSQDQYNDSSKVSSSGSGSPQSPLHLAAGSRGGTSPTEGDSIEDDEDARSESYSWKSHMNKPGKVDV

SEQ ID NO: 30929 - protein, 78 aa, Glycine max
  Clone ID: TF_701008362H1.pep
QHIPSGEVVGKSSSTASQSKARTTRTPELHEAFAAAVNHLGGRVTATPHGVLNQMTVEGLDIDHVQRHLQNYRTASYK

SEQ ID NO: 30930 - protein, 389 aa, Glycine max
  unsure (1)..(389): unsure at all Xaa locations
  Clone ID: TF_GmC575_1.pep
MYFFTEKMHSLKMGFPDYIQTLEEERRKIQVFSKELPLSLELVTQAIEACKQQLSGTASEYNLNGHSECSEQTTSTEGPVLEEFIPIKKMASSSPFCDEEDEDDEQHSHKQRVSKENNNSDKRKSDWLRSVQLWNPDPPAEEDVNKKVPGLELKRSGNGGAALHPPRLLGCGALPRVSVSKAPSSTSVAAASSSAAEPAAEKSLNEGQRKLRRCWSQDLHKRFLHALQQLGGAXVSISIYTATPKQIRELMNVDGLTNDEVKSHLQKYRLHTRRPIPMVHNSSDPQAAPFVLVGNIFVQSPEYAAVATSTASREVATVAAPARIYAPVATHPTPVSHPPDDSIKNPQFKKVKLFEHSNSDDRANHSEGAVHSNSPTSSSSTHTSTSLGY

SEQ ID NO: 30931 - protein, 249 aa, Glycine max
  Clone ID: TF_GmC62574_1.pep
MAACRAATATRFNGFSGDAFKSYFPLHQYGVGPSEASSGFMRSRFLQKLPNKRSMRAPHASGTSTLHARFVHAVELLGGHERATPKSVLELMDVKDLTLAHVKSHLQMYRTVKTTDKPAASSGHSDGSGEDDLSPMVSTADRGGLRQFPNHRGRPEWAAQQDMDYSSTTTTLWSNSSSCGESRLRPSSNDIDGLRSPILHSQTISGGHQIQECDSIQLKSNMPGSNLECKIPSLEFTLGRPDWDGKEQA

SEQ ID NO: 30932 - protein, 258 aa, Glycine max
  Clone ID: TF_GmC12582_1.pep
AAAGAYRAATATRFNGISGEAFKSHHPLHHHHSSSPHYGVGLGPSHETSAGLMRSRFLPKLPAKRSMRAPRMRWTSTLHARFVHAVELLGGQLEATPKSVLELMDVKDLTLAHVKSHLQMYRTVKTTDKPAASSGLSDGSGEDDMSPMGSSGGMRQFSDQRSLSDRPLQQDMDYSSGNNTLWSNSSSSRETWQQNNSNDVDGFRPPIFQSQQISGGHQIQECDSTQLKNSLSGSNLECKNPSLEFTLGRPDWNGKGQA

SEQ ID NO: 30933 - protein, 344 aa, Glycine max
  Clone ID: TF_GmC51280_1.pep
MDPQSMHFVLSTDSKPRLKWTPELHRRFIEATNQLGGADKATPKSLMRVMGIPGLTLYHLKSHLQKYRLGKSQELETCSDNKQEDYIETKSSSDGHCSREISIGAQNQLTENMQIAQALQMQMEVQRKLHEQIEVQKHLQLRIEAQGKYLQSVLKKAQEALAGYNSSPVGIELTKAELSQLVTIINNACPSSPISELTETRGLSLSCGERKRDRGTMCSLESSLTSSESSGRKEEKQPMEEIVEFKSSINVSLQLPLMEILTEDKASNGGSSNEASGRKRSATAAESDDGSCVVEQPCGKRCGNKLRKAKLSEMLDLNSQCQSDMDSTSSKTLDLNCSLNFWEP

SEQ ID NO: 30934 - protein, 185 aa, Glycine max
  Clone ID: TF_18691984.pep
LVDVHLPNMDGYEFLKHINKEIDIPVIIMSVDGSTSAVRKAITHGACDYWTKPFSENQFKIMWKHVAMKAWNEKKLQKKDFSEFASSVLDANLKDQKEISSNSKESDVDDCDAQPKKPRIAWKGELHCQFVKAVMHIGLDKAQPKKILEVMNIPGLTKDHVASHLQKYRFDLKKSNEVAVQQNEM

SEQ ID NO: 30935 - protein, 101 aa, Glycine max
  unsure (1)..(101): unsure at all Xaa locations
  Clone ID: TF_LIB4392-050-R1-K1-E7.pep
MVPHKSQGGVEQLANAGVLGGSAVKIAAAPAGGSGKQRLRWTSDLHDRFVDAITQLGGPDRATPKGVLRVMGVPGLTIYHVKSPLQKYRLAXYLPESPADG

SEQ ID NO: 30936 - protein, 207 aa, Glycine max
  Clone ID: TF_GmC594_2.pep
ELHRKFVAAVNQLGLDKAVPKKILDLMNVEGLTRENVASHLQKYRLYLKKAAQQANMVAALGGSDSYLRMGSIDGYGDFCTSSGSGRITNTTLPSYASTGIFSRLNSPAALNMRAISSSALIRPVQSQNINCSLNTLGNIQPSVFPANHSSSLLQGIPTSIELNQSKQSNCTTGISQLSQVELYLWTFVSHLIRSISFFFQSCSVSP

SEQ ID NO: 30937 - protein, 258 aa, Glycine max
  Clone ID: TF_GmC942_1.pep
MYACFGDKAIRFRFKVDWTPELHKKFVKAVEQLGIDQAIPSRILEIMKVEGLTRHNVASHLQKYRIHKRQSAPREEDRKWHNQRDAMQRNYYMQRPIMAYPPYHSNHTLSPAPIYPMWGQPGSQTAGVQIWGHPGYNIWHPTESCHWKPYQGVHVDAWGCPLLPAPQAPCFPYNQNIPGLHNPKAVDYRFGMPQSSFEHHPAEEVVDKVVKEAISKPWLPLPLGLKPPSMDSVLAELSKQGISGIPLGNKRSSTPKLR

SEQ ID NO: 30938 - protein, 696 aa, Glycine max
  unsure (1)..(696): unsure at all Xaa locations
  Clone ID: TF_GmC577_1.pep
MTVEKKMNDSGDEFPVGMRVLAVDDDPTCLLVLETLLRRCQYHATTTNQAIKALALLREHKDKFDLVISDVHMPDMDGFKLLELVGLEMDLPVIMLSANGDTKLVMKGISHGACDYLLKPVRMEELKNIWQHVIRRKKFDSKEKNKTRNIDKPTSNSSNGLGSSGTGNSDHNEKLTKKRKDQDRTAYEQQXNDHDNDDPSAQKKPRVVWSVELHRKFVAAVNQLGIDKAVPKKILDLMNVEKLTRENVASHLQKYRLYLKRISCVANQQTNMVVALGGADPSYLRMNSVSGVGHIQSISGSGQLHNNAFRSFPPSGIINRLNTPAGLNVHGFPSGVLQLSQSQNLKNTNDNLKFQSAIVPANQNGVHGMTVSVGLDQLQNNKGVMSVQNLTTVFDAKTTFPISNKLPDPRPKITNSGSHTPDVSFSNNALMLEPRPQGTQGSVRIETLSSSVASQHSEFSLSLLDQGRYSDNWASTVQPSVIQTNSYPPSECFGQTNIPPTDNMASVPLQGGNLSGASITSLSRQSYDSMTDMHSEGVTFTNRPGHISSNVPYQGWHDNNQDATHHSNILSINSLTPVNGAAVPAGHAAMNSALHRNLDFNYCDPLQMKHEGFVELTDEALSKQHQGNIMNLPKSQQSHFSNNLGSLEDLVSSMMKQENDKMKLLDGNLICNNYSGGLSRCDSRFSSTFQNIMHPR

SEQ ID NO: 30939 - protein, 506 aa, Glycine max
  Clone ID: TF_GmC606_2.pep
DMDGFKLLEHVGLEMDLPVIMMSVDGETSKVMKGVQHGACDYLLKPIRMKELRNIWQHVFRKKIHEAKEFESFESIHLMRNGSELSDDGNLFAVEDVTSSKKRKDADSKHDDKECLDPSSTKKARVVWSVDLHQKFVKAVNQIGFDKVGPKKILDLMNVPWLTRENVASHLQKYRLYLSRIQKENDQRSSSSGMKHSDFPSKDMGSFGFQNSVIKQQNDVAIDNYNHSDGSLQLQNVETKSHEADPKGIVSQSTIAKKGRILTGNIADTNMRESLRVGLNQTFPPLESEGNHAVFDCSMPTPYSWTEVPHMQLKEEHKSLVYLEDSFNQLPLHGKQQQHIHVDQSQSVASISSAPSITEEEAAACIEPKPLFADYNNDYASSVSSTGNAVATFPIQPGSLIMNGQSSERISTTTSGLKTQEYNNLSSISDQEIYQRNLLGCEAASASLDEDLHFYWLEGECYNNMNFGLQNIGMSEYYDPGLISEAPIHLYDSADYSVMDQGLFIA

SEQ ID NO: 30940 - protein, 487 aa, Glycine max
  unsure (1)..(487): unsure at all Xaa locations
  Clone ID: TF_GmC29852_1.pep
MDRPAAIFSDTVNLNGTVTQLSLLADGRLWWPEGGQRNLSIEKEVLGFTGDGPDIRLKTIVETEDGCCGGASRAKLVRNDVVFRPSSEETHRLWCQKLGEFIDSLGRPKRLFVFVNPFGGTKSAVIVFRDQVKPLLEDAQVQLTVQETKHQLHAKQVVQSLDFSKYDGIVCVSGDGILVEXVVNGLLQRQDWDTAIKMPLGVVPAGTGNGMAKSLLDSVGDPCTVPNAVLAIIRGRKRKLDVATITQGETRFFSVLMLAWGLVADIDIESEKYRWMGSARIDFYALTRILHLRHYIGCLYFVPAPGFEAYGDPTSYPGSSNNKGSNSELIDEEPLKLQRLGYQGPEIDLENQSWRVLNGPFISVWLHNVAWGAENTKAAPDAKFSDGYLDLIITKNCPKLPLLSLMSDLNNGGHVKSPYVMYLKVKVLVLEPGPRLGDQEKEGIIDADGEVLARGKGSYQCEQKALMAYDKLQITVDQGLATIFSPI

SEQ ID NO: 30941 - protein, 44 aa, Glycine max
  Clone ID: TF_LIB3242-572-P1-J1-E2.pep
LHEAFVEAVNHLGGSEKATSNGVLNLMKVAGLTLFNVRSLLQLI

SEQ ID NO: 30942 - protein, 153 aa, Glycine max
  unsure (1)..(153): unsure at all Xaa locations
  Clone ID: TF_LIB4392-004-Q1-K1-A1.pep
MVCTANDFTXWKDFPKGLRVLLLEGDSSSAAEIRXQLEAMDYKVSTFYDENEALSALSSSPKGFHVAIVEVSTSCSLGGFKFLENAKDLPTIMTSKDQCLNTMMKCIALGAVEFLSKPLSEDKLKNIWQHVVHKVDWTPELHKKFVKAVEQLY

SEQ ID NO: 30943 - protein, 371 aa, Glycine max
  Clone ID: TF_GmC200_1.pep
MVVCDFWELSLAQSQRKTPKSNIIMEPSLDLRLGFVPKPLSLFFGDVSGNRDKCDKVVTLDGFVQRLEEELTKVEAFKRELPLCILLLNDAIARLKEEKVKCSGMQDPPLKTSSGGNENENSARQKGNWMSSAQLWSTQKTKSRNEEDDRSVPANPINGNSCVLEKEGSQVPRFGLMARASELSHSNSKSVGGDISSGSSLLRVEVQSQPQPPQHMQQNPRKQRRCWSPELHRRFVDALQQLGGAQVATPKQIREPMQVEGLTNDEVKSHLQKYRLHVRRFPVSSTGQADNGSWMSQDESGDKSKGNNMSQSGSPQGPLTPLILGGAGGGSAKGLSSPGQNSVDGEDEQSDCRNWKGGLHHHQLEADNQCL

SEQ ID NO: 30944 - protein, 54 aa, Glycine max
  unsure (1)..(54): unsure at all Xaa locations
  Clone ID: TF_LIB3028-002-Q1-B1-G9.pep
QCWSPEFHSRFIKALDVPRCSQTSTQNEIKELMTVDXLTTSEVQTHLQNKRLHT

SEQ ID NO: 30945 - protein, 606 aa, Glycine max
  Clone ID: TF_GmC577_2.pep
ARRRQKGREHKDKFDLVISDVHMPDMDGFKLLELVGLEMDLPVIMLSANGDTKMVMKGISHGACDYLLKPVRMEELKNIWQHVIRRKKFDSKEKNKTSNLDKPTSNSGNGLGSSGTGNSDQNEKLTKKRKDQDEDEDEDQENDLDNEDPSAQKKPRVVWSVDLHRKFVAAVNQLGIDKAVPKKILDLMNVEKLTRENVASHLQKYRLYLKRISCVANQQANMVAALGVADPSYLRMSSVSGVGHVQTLSGSGQLHNNNFRSFPPSGIINRLNTPAGLNVHGFPSGVLQLSQSQNLNNANDHHKFQSVIVPVNQNGVQGMTVSVGLDQLQNNKVVMSVQNLTTVFDAKTTFPIPNKLPDPRPKITNSVSHTSDVHFSNNALMLEPRPQGSQGSVRIGTLSSSVASQHSEFSLSLLDQGRYSDNWTSAVQPSVIQTNFFPPSECFRQTNIPPADNMASVPLQGGNLSGPSITSLSRQSHDSMTEMHSEGMTFTNRPGHTSSNVPFQGWDDHNQDATHHSNIMSINSLTPVNGAAVQAGHAATNSVLHRNLDFNYCDPLQMKHEGFVELTDETLLKQHQGNTMDQQKSQENHFSNNLGSLEDLVSSMMK

SEQ ID NO: 30946 - protein, 379 aa, Glycine max
  Clone ID: TF_GmC89825_1.pep
MQFAEKMQPLKMGFREYIEALEEERKKIQVFPKELPLSLELVTQAIEACRQQLSGTVAEYNLNAQSECSEQTSTDGPVFEEFIPIKKRASQESVEEEDEDEEHFHKHKKTATDKKKSDWLRSVQLWNPNPPPTKEDVVVPRKTDVVEVKRNGGAFQPFQREEKSGDAKASINNDASAIGKAPSSPPVPATSSTGPVRVENKKEEKGQAQRKQRRCWSQELHKRFLHALQQLGGADSATPKQIRELMKVDGLTNDEVKSHLQKFRLHTRRSPIIHNNASSQAGPLFLVGNIFVQPSEYAAVATTSTASGEELTTVTTTTAPTGIYAPVAAHPPAVTHTLPIMKQKEHSHSEERPNHSVLSNSPASSSSTHTITTSPPVPN

SEQ ID NO: 30947 - protein, 582 aa, Glycine max
  Clone ID: TF_GmC606_1.pep
MVNGCFSSSPRHDAFPAGLRVLVVDDDLTWLRILEKMLKKCLYEVTTCCLATEALKKLRERKEAYDIVISDVNMPDMDGFKLLEQVGLEMDLPVIMMSVDGETSRVMKGVQHGACDYLLKPIRMKELRNIWQHVFRKRMHEARDFESHEGFDFEGIHLMRNGSDHSDDGNLFAVEETTSIKKRKDADNKHDDKEFGDHFPTKKARVVWSVDLHQKFVKAVNQIGFDIGPKKILDLMNVPWLTRENVASHLQKYRLYLSRLQKENDQKSSSSGIKHSDSPSKDLGSFSFLNTANKQQNDIATDSFSYSDGTLLIQMDATSYEGDLKGIVSEPTTEKRRASTSEIPDPKVQKSSQKSLNKPFTSVESSEANHAVFDCTIPTEYSWSEFPKGPLKEEQKTPVQLEDSLCQLPLHGTQHHIQIDQSQSIASINSNPSITEEEVAAKLETKPLYAGYESDYVNPVSSIGSAVEAFRSQSKSLMVSDQSSEPTFTSNLSLKTQGFNLDCISDLDFYQRNLLLGGEVASAPLDEDLNFFLLQSECYNMNFGLQNIDMSEYYDPRLTAEVPSHFYDSADYSSVDQSLFIA

SEQ ID NO: 30948 - protein, 344 aa, Glycine max
  Clone ID: TF_GmC13720_1.pep
ETVIYIYIYIYFFFLRLQLTRANAARETSEYDEERVMEWEAGLPTANDLTPLSQPLIPPELASAFSILPEPHRTLLDVNRASRNTLSTLRGGGGSVHQAFSSSNNNHNYDGDGDGGVEEEEEEDDDRDGSGPDSRKQRKIDCGAAEEADSAVQTETSAERTAVKRPRLVWTPQLHKRFVDVVAHLGIKNAVPKTIMQLMNVEGLTRENVASHLQKYRLYLKRMQGLSNEGPSASDQLFASTPVPQSLHDSAPPSNHSNGHGHGHGHSNGRGHGHGHGHGHLSVPMMSMPYPPPLMSMPYPPPMMSGMPHGHMGIPMPNSSATSAYHPYNMLHQRDWPHLAPNDK

SEQ ID NO: 30949 - protein, 257 aa, Glycine max
  Clone ID: TF_GmC381_1.pep
MYPRLIHPHDGIVTQDELQGGAASNLSHAHKGDPCLVLTADPKPRLRWTQDLHERFVDAVTQLGGASKATPKAIMRTMNVKGLTLFHLKRHLQKYRLGKQSGKDVGEGCKDGSYLLESPGADNTSPKLPTPDTNEGYEIKEALRAQMEVQSKLHLQVEAEKHLQIRQDAERRYMAMLERACKMLADQFISATVIDTDSQKFQGIGSKAPRGTLVDPLGFYSLPSTEVSGVNCPGRRNTAKSPTPKGRLFNRKLFNLT

SEQ ID NO: 30950 - protein, 418 aa, Glycine max
  unsure (1)..(418): unsure at all Xaa locations
  Clone ID: TF_GmC59217_1.pep
MYLHQQHQGKNIPSSSRMPIPSERHMFHHTGSERHMFLQTGNGSGDSGLVLSTDAKPRLKWTPDLHARFIEAVQQLGGADKATPKTVMKLMGIPGLTLYHLKSHLQKYRLSKSLHGQSNNVTHKITINSGAATDERLRENNETHMNSLNLAPQSNNKDLYISEALHMQIEERRRLNEQLEVQRLLQLRIEAQGKYLQAVLEKAQETLGRQNLGAVGLEATKLQLSELVSKVSSQCLNSAFSDRLKEIQGFSPHQQXKTNQPNTNDCSMDSCLTSCEGSQKEQEIQNGGMSLRPFNVHTFMERKEVIEGPNLNNLPNTDLNWCDPVKKNTFLTPLSMHADKRSPSNLSSIGLLEGETTENRSTIVRTESIKPAVAEKVSQDYGLPSNYFAASKLDQTTEDNKDTKTSCKQLDLNGFSWN

SEQ ID NO: 30951 - protein, 384 aa, Glycine max
  Clone ID: TF_GmC381_2.pep
MQKRREESDKIPVKRDSASSLPQPQSLVLFTSPFSPFPFLLPLSFAKWVIISFSHNTIFFTFSFFFASLRWGFKFHHRNRMFSRLIHPHEGQEDMQGGSNHAHLGDPCLVLTSDPKPRLRWTADLHERFVDAVTQLGGASKATPKAIMRTMNVKGLTLYHLKSHLQKYRLGKQSGKDSDEGLKDASYLQESPGTDNSSPKLPASDANEGHEVKEALRAQMEVQSKLHLLVEAEKHLQIRQDAERRYMGMLERACKMLADQFIGDVIIDRDGQKFQGLENKTSRSPLVDHGGFFPAACTEVGGMHVSEVPPILQPQGAECSSESCLKSLESLGGLTLEGSPGGSKKRMLNLDSMVAPLIWSEANTRTQGIHLAQVNPPGMTRYGM

SEQ ID NO: 30952 - protein, 307 aa, Glycine max
  Clone ID: TF_GmC381_4.pep
MFSRLIHPHEGQEDMQGGSNHAHLGDPCLVLTSDPKPRLRWTADLHERFVDAVTQLGGASKATPKAIMRTMNVKGLTLYHLKSHLQKYRLGKQSGKDSDEGLKDGMSASYLQESPGTDNSSPKLPASDANEGHEVKEALRAQMEVQSKLHLLVEAEKHLQIRQDAERRYMGMLERACKMLADQFIGDVTIDRDGQKFQGLESKTSRSSLVDHVGFYPQACTEVGGMHASVVSPILQPQGADCFTESCLTSLESLGGLTLEGSPGGSKKRMLNLDSMVAPLIWSEANTRTQGIHLAKVNPSGMTRYGM

SEQ ID NO: 30953 - protein, 125 aa, Glycine max
  Clone ID: TF_GmC381_6.pep
MFSRLIHPHEGQEDMQGGSNHAHLGDPCLVLTSDPKPRLRWTADLHERFVDAVTQLGGASKATPKAIMRTMNVKGLTLYHLKSHLQKYRLGKQSGKDSDEGCKDASYLEESPETDNSSAKVPDAG

SEQ ID NO: 30954 - protein, 221 aa, Glycine max
  unsure (1)..(221): unsure at all Xaa locations
  Clone ID: TF_LIB4390-015-R1-K1-H4.pep
MAGECSQAMASKSNADQNIKLGQKRKEQSEDEEEEEYDQENEEPSNQKKPRLVWDAELXYDXLAAINHLGIDTPNAFPKRILDLMNVEGLTRENIASHLQKYRLGLKKSTQQPSMVATLGNSDPYQQMDSIEGFRTLSGSGGMISTTLPSYASGGLFCRLNSPSGLRGINSSLLVQPVHSQNIDSKSIKTLGNMQLSMFSAQTSSLLQGHSNINRWVTIFS

SEQ ID NO: 30955 - protein, 167 aa, Glycine max
  Clone ID: TF_jC-gmro02800038h07a1.pep
ARGFLHALQQLGGADTATPKQIREIMNVDGLTNDEVKSHLQKYRLHTRRPSPMVHNSSNPQAAPFVLVGNIFVQSPEYAAVATSTASREVATVAAPAGIYAPVATHPIPVSHPPADSIKNPQFKKVQLFEHSISDERANHSEGAVHSNSPTSCSSTHTSTSLAIEFK

SEQ ID NO: 30956 - protein, 228 aa, Glycine max
  Clone ID: TF_GmC436_1.pep
MKNSKKTCARKYHKSENPRLRWTPELHEYFVEVVEGLGGKNKATPKSILHMMHVKGLRISHIKSHLQMYRNMKGGTILTSMQQEMEENVHVKDHHPICSNCSSQSIIFRSQGTKFKLKASKYDTGIVNQEIHPLENKGLSQTSETDYDLNQEPESSACLFSESSNEEKSRTMKFLDLSLSFGSSPIPTMDGDQERMRFSSPNTADNHVIDSNSVQSHGSNYINLDLTI

SEQ ID NO: 30957 - protein, 154 aa, Glycine max
  Clone ID: TF_GmC381_8.pep
MFSRLIHPHEGQEDMQGGSNHAHLGDPCLVLTSDPKPPLFQSADLHERFVDAVTQLGGASKATPKAIMRTMNVKGLTLYHLKSHLQKYRLGEQFGKDSDEGCQDGMSASFLQESPGADNSSPKFPGAHEGSEVKGAFLSPVGRAKTSLTRGGGE

SEQ ID NO: 30958 - protein, 409 aa, Glycine max
  Clone ID: TF_GmC498_1.pep
MSTSSRALPTPLENKYMKPPDSFQLSPVRDLTANSASSNSIRSAGKMFSSPSKCPDDFPFSSVSQHDRQYQDPPFVSQTIGDSVSSEIHSMTFISHPQENEDLSWGPDPCQDILGFPENVSVQHDQVENNGCYINDDNVKRSDFGEWVDQLMSIDDSLHPSWSQLLADDNVAEPKPKASQVPPQQHIPSGEVVGNSASTASQTKARMRWTPELHEAFVEAVNHLGGSEKATPKGVLNQMKVEGLTIYHVKSHLQKYRTARYKPEPSEGTSEKKVTPMEEMKSLDLKTSKGITEALRLQMELQKRLHEQLEIQRKLQIQIEDQGKRLQMMFEKQREMGDSKVNVSLDEPSAAAPSDTVETTNEERHKFESIPKAIPEEKESSTTKQIAGEAEEMIKEDEVAPPTKRVKSS

SEQ ID NO: 30959 - protein, 451 aa, Glycine max
  Clone ID: TF_GmC1091_1.pep
MASPSELSLDCKPQSYSLLLKSFGDQTDHSYKLEEFLNRLEEERLKIDAFKRELPLCMQLLTNAMEASRQQLQAFKVNHGAKPVLEEFIPMKHLASESSEKATNMSDKANWMTSAQLWSQASSEGTKQQPPITTLKESDIGFSISPKLALDNKQRNGGGAFLPFSKERNSCQGSTLRPLPELVLASAEKEMEDKKRAEVEIKGVSCQSRKENSGSDGAVVDQGKGGSPVASSHAQTTTTTTSAQTHRKARRCWSPDLHRRFVNALQMLGGSQVATPKQIRELMKVDGLTNDEVKSHLQKYRLHTRRPSPSPQAGAAAPQLVVLGGIWVPPEYATAAHTATPTLYGAHPTSHAPPPHYCAATPMPQDFYTTAPPQPLLPPPPPHHNALHHLHMYKAAPHGQGSPESDVPSNGERSESIEDGKSESSSWKGENEGERKGISKGSNGSEITLKF

SEQ ID NO: 30960 - protein, 267 aa, Glycine max
  unsure (1)..(267): unsure at all Xaa locations
  Clone ID: TF_GmC496_1.pep
RAAARRRQKGDYMLGQSSCALYLSLRYHLLHPDYLFYRIRKLQKNFKLRVVLCHVXEDVIKPLLEVTKTALLHDCTLLYGWSLEECGRYLETIKVXENKPADIIQGQMDTDYLSRLTHALTTVRHVNKTDVVTLGTTFGSLCNIMGASMEDLARCPGIGERKVKRLFDTFHEPFKHVESSRQAIPETSVQNKPASPNNAESSSLIEDKHEDAEDVSXRRKKELEVTVKSALSAAFAKYSGRVGKRKSTSQVEEKGESIISKESEAET

SEQ ID NO: 30961 - protein, 151 aa, Glycine max
  Clone ID: TF_GmC184192_1.pep
SITIKSKDAAQSPLRKALSPININGNQKPLESQTPFLATCSTNKGPQKNDTPLGKFSTRIGKFSTRSFTLKNCLVQEYIDFLNNASREELLELKGIGEKMAEYIIDLREESPLKSLNDLEKIGLSSKQAHNLFTKAAKTLFEDKAEDSILG

SEQ ID NO: 30962 - protein, 270 aa, Glycine max
  Clone ID: TF_GmC708193_1.pep
MEKKTRNHVVLNSGMEKKTRNHVVLNSGVEKDDSFSKARENVKLDLMVQNDDSSFNANIEVELNPLADQGISVDEEDHQKEHTPYARNYSEALAKIVQEDHSMNKENNNSRAIGDDSSATISSPPISSQLRDLSNSLKMLYSSTPSCMQIPEKEPIPLDIVEPKTPTIEQNMSINRLDAMNAKSPWETFSMRGSGMKSSLVQEYLRFLNTANKEELKKLKGIGEKRATFILELREESPEPFKSLDDLKDIGLSAKQVKGIMKKEVGELFS

SEQ ID NO: 30963 - protein, 343 aa, Glycine max
  Clone ID: TF_GmC202_1.pep
MMAATMEQQQQRPQQQDEAEEIQHGPLPVEQLQASGIAATDVKKLKDAGICTVESVAYTPRKDLLQIKGISEAKVDKIIEAASKLVPMGFTSASELHAQRDAIIQITTGSTELDKILEGGVETGSITELYGEFRSGKTQLCHTLCVTCQLPLDQGGGEGKAMYIDAEGTFRPQRLLQIADRFGLNGADVLENVAYARAYNTDHQSRLLLEAASMMVETRFAVMIVDSATALYRTDFSGRGELSARQMHLAKFLRSLQKLADEFGVAIVITNQVVSQVDGSAVFAGPQIKPIGGNIMAHATTTRLALRKGRGEERICKVISSPCLAEAEARFQICAEGVSDVKD

SEQ ID NO: 30964 - protein, 103 aa, Glycine max
  unsure (1)..(103): unsure at all Xaa locations
  Clone ID: TF_LIB3242-368-Q1-J1-E12.pep
PEVGNHYYGLXHPFIPHQIRMTRALLTQDGGVQHIQFHKPSPTXYYHLCHLHADDYVXLLQNITPETQNDHLKQLIRYNVKQDRPIKNNQKNPSLSFTKGADP

SEQ ID NO: 30965 - protein, 224 aa, Glycine max
  Clone ID: TF_GmC129_2.pep
EYINELVEVDKEGGKQLCGGTFLNPGSWDAALLAAGTTLSAMKHLLNGDGKVSYALVRPPGHHAQPSQADGYCFLNNAGLAVQLALDSGCKKVAVIDIDVHYGNGTAEGFYRSNKVLTISLHMNHGSWGPSHPQSGSVDELGEGEGYGFNLNIPLPNGTGDKGYVHAFNELVVPSIQKFGPDMIVLVLGQDSNAVSYSIFAVGNLYFDHFSILLPSLCRLEFML

SEQ ID NO: 30966 - protein, 473 aa, Glycine max
  Clone ID: TF_GmC1634_2.pep
MESGGNSLPSGSDGVKRKVSYFYDPEVGNYYYGQGHPMKPHRIRMTHALLAHYGLLQHMQVLKPMAAKDRDLCKFHADDYVAFLRGITPETQQDQLRQLKRFNVGEDCPVFDGLYSFCQTYAGGSVGGALKLNHGVSHASVNWAGGLHHAKKCEASGFCYVNDIVLAILELLKIHERVLYVDIDIHHGDGVEEAFYTTDRVMTVSFHKFGDYFPGTGDIRDIGYGKGKYYSLNVPLDDGIDDESYQSLFKPIMGKVMEIFRPGAVVLQCGADSLSGDRLGCFNLSIKGHAECVRHMRSFNVPLLLLGGGGYTIRNVARCWCYETSVALGIELDDKMPQHEYYEYFGPDYTLHVAPSNMENKNSRHLLDEIRAKLLDNLSRLQHAPSVPFQERPPDAELLERDEDQDDRDERWDPDSDREADNDSNPVRRRVKSECVEAEDKDAVLGVDSMAVDEPCIKEEQDNLKELSDHRSR

SEQ ID NO: 30967 - protein, 130 aa, Glycine max
  Clone ID: TF_GmC974_3.pep
QCEQDSLAGDRLGCFNLSIDGHAECVSFVKRFNLPLLVTGGGGYTKENVARCWTVETGVLLDTELPNEIPENDYIKYFAPEFSLKIPNGQIENLNSKSYLSTIKMQVLENLRCIQHAPSVQMQEVSSYLK

SEQ ID NO: 30968 - protein, 121 aa, Glycine max
  Clone ID: TF_GmC1790_2.pep
MDTGGNSLPSAPDGVKRKVCYFYDPEVGNYYYGQGHPMKPHRIRMTHALLAHYGLLQHMQVHKPFPARDRDLCRFHADDYVAFLRSITPETQQDHLRQLKRFNVGEDCPVFDGLYSFCQTY

SEQ ID NO: 30969 - protein, 429 aa, Glycine max
  unsure (1)..(429): unsure at all Xaa locations
  Clone ID: TF_GmC974_1.pep
MRSKDRIAYFYDGDVGSVYFGAKHPMKPHRLCMTHHLVLSYDLHKKMEIYRPHKAYPVELAQFHSADYVEFLNRITPDTQHLFLNELTKYNLGEDCPVFDNLFEFCQIYAGGTIDAARRLNNQLCDIAINWAGGLHHAKKCEASGFCYINDLVLGILELLKYHARVLYIDIDVHHGDGVEEAFYFTDRVMTVSFHKYGDSFFPGTGDAKEIGEREGKFYAINVPLKDGIDDSSFTRLFKTIISKVVETYQPGAIVLQCGADSLAGDRLGCFNLSIDGHAECVSFVKRFNLPLLVTGGGGYTKENVARCWTVETGVLLDTELPNEIPXNDYIKYFAPEFSLKVPNGPIENLNSKSYLSTIKMQVLENLRCIQHAPSVQMQEVPPDFYIPEFDEDEQNPDERIDQHTQDKHIQRDDEYYDGDNDNDQMNIS

SEQ ID NO: 30970 - protein, 476 aa, Glycine max
  Clone ID: TF_700841470_FLI.pep
MGMEEESSNNSSIIEGGASLPSTGSDAKKRRVTYFYEPTIGDYYYGQGHPMKPHRIRMAHNLIVHYSLHRRMEINRPFPASPADIRRFHSDDYVDFLSSVSPENLADSAFSRHLKRFNVGEDCPVFDGLFPFCQASAGGSLGAAVKLNRADADIAINWAGGLHHAKKSEASGFCYVNDIVLGILELLKVHRRVLYVDIDVHHGDGVEEAFYTTDRVMTVSFHKFGDFFPGTGHVKDIGVGSGKNYAVNVPLNDGMDDESFRSLFRTIIQKVLEVYQPEAVVLQCGADSLSGDRLGCFNLSVRGHADCLRFLRSFNVPLMVLGGGGYTIRNVARCWCYETAVAVGVEPDNKLPYNEYYEYFGPDYTLYVDPSNMENLNTPKDMEKIRNTLLEQISQLPHAPGVPFQTTPPTLQLPEEAEEDMDRRPKLRKWDGEDYDSDPDEGGKANSKFPNVTAHMRDITDEMEEEKPEVHPSSCC

SEQ ID NO: 30971 - protein, 150 aa, Glycine max
  unsure (1)..(150): unsure at all Xaa locations
  Clone ID: TF_GmC141697_3.pep
MERENDNSAKSSVNGQRRVGLLYDERMCKHHTPDDEDHPETPNRIRAIWNKLQSTGVPQRCVILEAKEAEDKHLLLVHSENHVNLIKNISSKQFNSRRHKIASKLDSIYFNXGSSEAAYLAAGSAVKVXERVASRELDSAVAIXRPXGHH

SEQ ID NO: 30972 - protein, 405 aa, Glycine max
  unsure (1)..(405): unsure at all Xaa locations
  Clone ID: TF_uC-gmflminsoy057h02_FLI.pep
RMEINRPFPASPADIRRFHSDDYVDFLSSVSPETLADSAFSRHLKRFNVGEDCPVFDGLFPFCQASAGGSLGAAVKLNRADADIAINWAGGLHHAKKSEASGFCYVNDIVLGILELLKAHRRVLYVDIDVHHGDGVEEAFYTTDRVMTVSFHKFGDFFPGTGHVKDIGVGSGKNYAVNVPLNDGMDDESFRSLFRSIIQKVMEVYQPEAVVLQCGADSLSGDRLGCFNLSVRGHADCLRFLRSFNVPLMVLGGGGYTIRNVARCWCYEXVAVGVEPDNKLPYNEYYEYFGPDYTLYVDPSNMENLNTSKDLEKLRNTLLEQISRLPHAPSVPFQTTPPTLQLPEEAEENMDRRPKLRKWDGEDYDSDPEEGGKDNSKFSNITAHMRDIADEMEEEKPEEHPSSCS

SEQ ID NO: 30973 - protein, 181 aa, Glycine max
  Clone ID: TF_GmC382331_1.pep
GTIFPGKCYSIPARGLEPEELITVHSLEHIESVEVTSESLSSYFTSDTYANEHSALAARLAAGLCADLASAIVSGRAKNGFALVRPPGHHAGVRQAMGFCLHNNAAVAALAAQAAGARKVLILDWDVHHGNGTQEIFEQNKSVLYISLHRHEGGKFYPGTGAAEEVHDCRQIFKLNCCCWQ

SEQ ID NO: 30974 - protein, 214 aa, Glycine max
  Clone ID: TF_GmC1063_1.pep
ARGIFGNVAIAARYSQRVHGLKRVFIIDFDVHHGNGTNDAFYDDPDVFFLSFHQDGSYPGTGKFDEVGSGDGEGTTLNLPLPGGSGDTAIRTVFDEVIVPCAQRFKPDIILVSAGYDGHVLDPLANLQYTTGTYYMLASSIKQLAKDLCGGRCVFFLEGGYNLKSLSYSVADTFRALLGDRSLASEFDNPNILYEEPSTKVKQAIQKIKHIHSL

SEQ ID NO: 30975 - protein, 472 aa, Glycine max
  Clone ID: TF_GmC305_1.pep
MGMEEESSIIEGGASLPSSGSDAKKRRVTYFYEPTIGDYYYGQGHPMKPHRIRMAHNLIVHYSLHRRMEINRPFPASPADIRRFHSDDYVDFLSSVSPETLADSAFSRHLKRFNVGEDCPVFDGLFPFCQASAGGSLGAAVKLNRADADIAINWAGGLHHAKKSEASGFCYVNDIVLGILELLKAHRRVLYVDIDVHHGDGVEEAFYTTDRVMTVSFHKFGDFFPGTGHVKDIGVGSGKNYAVNVPLNDGMDDESFRSLFRSIIQKVMEVYQPEAVVLQCGADSLSGDRLGCFNLSVRGHADCLRFLRSFNVPLMVLGGGGYTIRNVARCWCYETAVAVGVEPDNKLPYNEYYEYFGPDYTLYVDPSNMENLNTSKDLEKLRNTLLEQISRLPHAPSVPFQTTPPTLQLPEEAEENMDRRPKLRKWDGEDYDSDPEEGGKDNSKFSNITAHMRDIADEMEEEKPEEHPSSCS

SEQ ID NO: 30976 - protein, 349 aa, Glycine max
  Clone ID: TF_GmC1092_1.pep
ASTKCEASGFCYVNDIVLAILELLKQHERVLYVDIDIHHGDGVEEAFYTTDRVMTVSFHKFGDYFPGTGDVRDIGYGKGKYYSLNVPLDDGIDDESYHFLFKPIIGKVMEVFRPGAVVLQCGADSLSGDRLGCFNLSIRGHAECVKYMRSFNVPLLLLGGGGYTIRNVARCWCYETGVALGIEVDDKMPQHEYYEYFGPDYTLHVAPSNMENKNSRHLLEEIRSKLLENLSKLQHAPSVQFQERPPDSDLGEADEDHDDGDEPWDPDSDMDVDVERELVSSKVKKEIAEPQPNDLEDQRSGEHLRDSDTAVAETCMKALDISSQKADEDNVKVEQNTVNDLAKETDLKG

SEQ ID NO: 30977 - protein, 190 aa, Glycine max
  unsure (1)..(190): unsure at all Xaa locations
  Clone ID: TF_LIB4201-008-Q1-K1-G3.pep
MESGGNSLPSGSDGVKRKVSYFYDPEVGNYYYGQGHPMKPHRIRMTHALLAHYGLLQHMQVLKPTAAKDRDLCKFHADDYVAFLRGITPETQQDQLRQLKRFNVGEDCPVFDGLYSFCQTYAGGSVGGALKLNHGACDVAINWAGWSTSCXGSVRASGFCYVNDIVLAILELLXIHERVLYVDIDIHHGD

SEQ ID NO: 30978 - protein, 470 aa, Glycine max
  unsure (1)..(470): unsure at all Xaa locations
  Clone ID: TF_GmC305_2.pep
MGMEEESSNNSSIIEGGASLPSTGSDAKKRRVTYFYEPTIGDYYYGQGHPMKPHRIRMAHNLIVHYALHRRMQVNRPFPAAEADIGRFHADDYVDFLSTVSPQILSENSHSHYRQLKRFNVGEDCPVFDGLFDFCRASAGGSIGAAVRLNREDADVAINWAGGLHHAKKAEASGFCYVNDIVLGILELLKVHRRVLYIDIDVHHGDGVEEAFYTTDRVMTVSFHKFGDFFPGTGHIKDIGVGAGKNYSLNVPLNDGLDDEXFRGLFRPIIQKVMDVYQPDAVVLQCGADSLSGDRLGCFNLTVKGHADCLRFLRSFNVPLMVLGGGGYTVRNVARCWCYETAVAVGVEPSPKLPYNEYYEYFGPDYNLHVEPSTMENLNTPRDLEKIRNTLLEQLSRLPHAPSAPFQTTPSVIEVPEEEEEDMDVRPKRRIWSGEDFDSDHDDDMASSKNSDLTAQTSRSVADDMDEDKD

SEQ ID NO: 30979 - protein, 174 aa, Glycine max
  unsure (1)..(174): unsure at all Xaa locations
  Clone ID: TF_GmC1790_1.pep
MDTGGNSLPSAPDGVKRKVCYFYDPEVGNYYYGQGHPMKPHRIRMTHALLAHYGLLQHMQVHKPFPARDRDLCRFHADDYVAFLRSITPETQQDHLRQLKRFNVGEDCPVFDGLYSFCQTYAGGSVGGAVKLNHDQCDIAVNWAGGLHHAKKCEASGFCYVNDIXLAILXLLKH

SEQ ID NO: 30980 - protein, 429 aa, Glycine max
  Clone ID: TF_GmC974_2.pep
MPSKDKIAYFYDGDVGSVYFGAKHPMKPHRLCMTHHLVLSYDLHKKMEIYRPHKAYPVELAQFHSADYVEFLNRITPDTQHLFLKELTKYNLGEDCPVFDNLFEFCQIYAGGTIDAARRLNNQLCDIAINWAGGLHHAKKCEASGFCYINDLVLGILELLKYHARVLYIDIDVHHGDGVEEAFYFTDRVMTVSFHKYGDLFFPGTGDAKEIGEREGKFYAINVPLKDGIDDSSFTRLFKTIISKVLETYQPGAIVLQCGADSLAGDRLGCFNLSIDGHAECVSFVKRFNLPLLVTGGGGYTKENVARCWTVETGVLLDTELPNEIPENDYIKYFAPEFSLKIPNGQIENLNSKSYLSTIKMQVLENLRCIQHAPSVQMQEVPPDFYIPEFDEDEQNPDERLDQHTQDKHIQRDDEYYDGDNDNDQMDVS

SEQ ID NO: 30981 - protein, 49 aa, Glycine max
  unsure (1)..(49): unsure at all Xaa locations
  Clone ID: TF_LIB4164-050-R1-K1-G7.pep
VVKRVASRELDSAVAIVRPPGHHAEQQEXMGFCLFNNVAVAARYLLDKK

SEQ ID NO: 30982 - protein, 151 aa, Glycine max
  unsure (1)..(151): unsure at all Xaa locations
  Clone ID: TF_GmC46078_1.pep
FDAARGDXXXCCDITXXXYAHMTNMLNXXXGXKLLVILEGGYNLRSISSSATAVIKVLLGESPGCELENSFPSKAGLQTVLEVLKIQMNFWPALGPIFVTLESQWRVYCFGRKRKQIKKRRRVLVPMWRWGRKSLLFHFLNGHLNVKSKLC

SEQ ID NO: 30983 - protein, 348 aa, Glycine max
  unsure (1)..(348): unsure at all Xaa locations
  Clone ID: TF_GmC1863_1.pep
MSSSSANDAEALRRNRILSSKLYFDVSPSKVPLIYSASYDIEFLGIEKLHPFDSSKWGRICGFLVSFGILDKKCVVEPLEASKDDLLVVHSESYLNTLKQSSKVAMIVEVPPVALIPNCLVQQKVLFPFXKQVGRTILAAKLAKERGWAINMGGGFHHCSAQKGGGFCAYADISLCIHFAFVRLNISRVMIIDLDAHQGNGHEMDFAYDSRVYILDMYNPGIYPLDYEARNYINQKVEVKSGTVTEEYLQKLDEALEVAGHRFNPELVIYNAGTDILEGDPLGRLEISPEGIALRDEKVFRFAREKNIPIVMLTSGGYMKSSAGVIADSIVNLSKKCLIETSGAPKST

SEQ ID NO: 30984 - protein, 381 aa, Glycine max
  Clone ID: TF_GmC129_1.pep
MADAGAEGASSSTVGQIDVFWHEGMLKHDTGNGVFDTGMDPGFLEVLEKHPENSDRVKNLVSILKRGPISPYISWHLGTPAKIPELFSFHTPEYINELVEVDKEGGKQLCGGTFLNPGSWDAALLAAGTTLSAMKHLLNGDGKVSYALVRPPGHHAQPSQADGYCFLNNAGLAVQLALDSGCKKVAVIDIDVHYGNGTAEGFYRSNKVLTISLHMNHGSWGPSHPQSGSVDELGEGEGYGFNLNIPLPNGTGDKGYVHAFNELVVPSIQKFGPDMIVLVLGQDSNAFDPNGRQCLTMEGYREIGRIVHLLAKRHSAGRLLIVQEGGYHVTYSAYCLHATLEGVLNLPMPLLADPIAFYLDDETFSVQVIEAIKNYQKDKVR

SEQ ID NO: 30985 - protein, 254 aa, Glycine max
  unsure (1)..(254): unsure at all Xaa locations
  Clone ID: TF_GmC305_3.pep
NLLNLLIVSSFAELIFSYLLYVTGQRVLYVDIDVHHGDGVEEAFYTTDRVMTVSFHKFGDFFPGTGHVKDIGVGSGKNYAVNVPLNDGMDDESFRSLFRTIIQKVMEVYQPEAVVLQCGADSLSGDRLGCFNLSVRGHADCLRFLRSFNVPLMVLGGGGYTIRNVARCWCYEVCFFLFXLDYNVTWYLFNLLIWLHAFSLFXTAVAVGVEPENKLPYNEYYEYFGPDYTLYVDPSNMXNLNTPKGMEKIRCLYY

SEQ ID NO: 30986 - protein, 196 aa, Glycine max
  unsure (1)..(196): unsure at all Xaa locations
  Clone ID: TF_GmC1634_1.pep
MESGGNSLPSGSDGVKRKVSYFYDPEVGNYYYGQGHPMKPHRIRMTHALLAHYGLLQHMQVLKPTAAKDRDLCKFHADDYVAFLRGITPETQQDQLRQLKRFNVGEDCPVFDGXLYSFCQTYAGGSVWXGLLKLNHGXCDVAINWAGGLHHAKKCEASGFCYVNDIVLAILELLKIHEVSLINSPHYLIDAWLFSF

SEQ ID NO: 30987 - protein, 600 aa, Glycine max
  Clone ID: TF_GmC81_1.pep
MAYAAPPLDPPGIGTNSPSSQKKRVAYFYDSDVGNYAYQSGHLMKPHRIRMAHSLVMNYGLYNKMEIYRAKPASKYEMTQFHTDEYVDFLQRVTPDNEHLLAKECAKHNVGEDCPPFDGVFEFCAISAGGSMEGAARLNRAKCDMAINWAGGLHHAKKNEASGFCYINDIVLAILELLRFHARVLYIDIDVHHGDGVEEAFYTTDRVMCVSLHKYGEFFPGTGDLRDIGIGQGKHYSVNVPLRDGIDDASYKDVFESVTTWAVEFFQPGAIVLQCGADSLSGDRLGAFNLSLAGHANCVNFVKKFNLPTLFLGGGGYTIRNVARAWAYETGQIVGVELSRSMPFTDYYEYYSPDFELDVKPSNMDNRNSAEYLAKIKSFVYTNLRQAQPVPSVQLQDVPRYPVGMSEHIDDMDDRLDDEDADEETSKDQRLTERVEDRMIEDDMDMSGLEDARGVDSGADADHGSPSIVGEGGSGCKVLSSDHDTDQITEPVPSIDPGNDPEPDRTTMMLQEAIRDESNEVSQPTNVEQTVVQRDAPAEHVEIIAQPSIVLESAPMQPEPPIVQCMNRVDSHTLGLSDAAEAVEAMENNHKGGNENIGLS

SEQ ID NO: 30988 - protein, 359 aa, Glycine max
  unsure (1)..(359): unsure at all Xaa locations
  Clone ID: TF_GmC141697_2.pep
MERENENSVNAQRRVGLLYDETMCKHHTPDDEDHPENPNRIRAIWNRLQSAGVLQRCVILEAKEAEDKHLLLVHSINHVNLIKNISSKQFNSRRHKIASKLGSIYFNEGSSEAAYLAAGSAVEVVKRVASRELDSAVAIVRPPGHHAEQQEAMGFCLFNNVAVAARYLLDERRLEGVKKILIVDWDVHHGNGTQKMFWNDSRVLFFSVHRHEFGSFYPANDDGFYTMIGEGAGAGYNINVPWENGRCGDADYFAVWDHILLPVAKEFNPDIIIVSAGFDAAVGDPLGGCRVTPFGYSVLLEXLMNFAEGRIVLILEGGYNLDSIAKSMHACLEVLLEDSLLLDPXEAYPFESTWRVIKA

SEQ ID NO: 30989 - protein, 97 aa, Glycine max
  Clone ID: TF_LIB3242-368-Q1-K1-E12.pep
NVPLDDGIDDKSYHFLFKPIIGKIMEVFRPGAVVLQCGGDYLFGDRLGCFNLSIRGHAECVKYMRSFNVPLLILGGGGYTIRNVARCWCYEVECCFN

SEQ ID NO: 30990 - protein, 87 aa, Glycine max
  unsure (1)..(87): unsure at all Xaa locations
  Clone ID: TF_15812308.pep
QSVTTLAPVYLCSPLDYLSVVALELAVNAPPDTEKNKNIPRHALLLATIDLEMLKXLASVIIAHDGVLSNIKPALLTNKTETSSKEL

SEQ ID NO: 30991 - protein, 56 aa, Glycine max
  Clone ID: TF_LIB3039-034-Q1-E1-H5.pep
MARTKQTARRSGGGKAHRKHLATKAARKSAPTSGGVKKPHRYRPESVALRDIRKYQ

SEQ ID NO: 30992 - protein, 68 aa, Glycine max
  unsure (1)..(68): unsure at all Xaa locations
  Clone ID: TF_LIB3040-010-Q1-E1-B10.pep
RKALRASKITAANSDKATDSNKPNSRSSRAEIQFPVGRIHRQLRQMVQSNXHVEATAALYLASTLEYL

SEQ ID NO: 30993 - protein, 111 aa, Glycine max
  unsure (1)..(111): unsure at all Xaa locations
  Clone ID: TF_LIB3107-078-Q1-K1-F5.pep
MVTSKRTALYSTGXGKLPRSSLKPRMYSGTAPTTDGVNKPHRYWPRSVALCEIQKEQRSTVLLIRKLSFQRMIRVIAHNMKTDLRFQSHAVLALQXEAXEAYLGELFEDTN

SEQ ID NO: 30994 - protein, 62 aa, Glycine max
  unsure (1)..(62): unsure at all Xaa locations
  Clone ID: TF_LIB3170-033-Q1-K1-F2.pep
MARSKHTACKSTGGNAPRXQLATWAERXSARTTAGVKKPHRYRPITVALREITKYQNSTELL

SEQ ID NO: 30995 - protein, 80 aa, Glycine max
  unsure (1)..(80): unsure at all Xaa locations
  Clone ID: TF_LIB3039-023-Q1-E1-D9.pep
NAPKKQLASKASPKXAPATFGVYNRHSFRPLTVALTEILQXQHSTNPLMTKLPYQTLVKXIAQDIKTHHSFQSNAMSDLH

SEQ ID NO: 30996 - protein, 75 aa, Glycine max
  unsure (1)..(75): unsure at all Xaa locations
  Clone ID: TF_700988871H1.pep
MARTKQTARKSXTGGKAPRKQLXTKAARKXSAPTTXGXXKPXRYRPGTVALRXIRKSQKSXELLIRKLPFQRXVR

SEQ ID NO: 30997 - protein, 87 aa, Glycine max
  unsure (1)..(87): unsure at all Xaa locations
  Clone ID: TF_jC-gmX3042004B07sg10K4b1.pep
MARAKQTXRKYTGGKAPTKQLAXTKAARKSAPTTGGVKKPYRYRTVTVALREIRKYQKRTXLLHRRHPSCALDMQTLQDYQTELWRQ

SEQ ID NO: 30998 - protein, 86 aa, Glycine max
  Clone ID: TF_LIB3167-080-P1-K1-D7.pep
GPGFRKQPQLARPKQTVRKSTGGKAPRKQLAPKVERRFEPTTGGVKKPNRFGPGPVVFVEFRNSQKSPELLFRKLPFQRLFRELVK

SEQ ID NO: 30999 - protein, 77 aa, Glycine max
  unsure (1)..(77): unsure at all Xaa locations
  Clone ID: TF_jC-gmXLIB3564P090de03a1.pep
KLPLYRLVRQIAQDFKSLFSFQKQSCVXALQEAVKAYIVGLVKNTSLSTIHAKRVTIMAKDIQLASRVRVTSPYKQG

SEQ ID NO: 31000 - protein, 83 aa, Glycine max
  Clone ID: TF_jC-gmle01810084c01a1.pep
MARTQASSAAQRGRPSTGGKGRPSDAGKSRPSESGKEVTKAPRRSSGGKTPASPGTRKKPRYKPGTVALREIRRYQKSTDLLL

SEQ ID NO: 31001 - protein, 60 aa, Glycine max
  unsure (1)..(60): unsure at all Xaa locations
  Clone ID: TF_13790103.pep
MDAGGKIKKGAGGRKGGGPKKKPVSRSVKAGLQFPVGRIGPYLKKGRXPQRVGPGPPYTG

SEQ ID NO: 31002 - protein, 39 aa, Glycine max
  Clone ID: TF_jC-gmfl02220103c09a1.pep
ARDLVGLFEVSFYCAIHAYRVTVVPKDIQLARRILGERA

SEQ ID NO: 31003 - protein, 90 aa, Glycine max
  unsure (1)..(90): unsure at all Xaa locations
  Clone ID: TF_uC-gmflLIB3260P045a12b1.pep
GPARNTGPKTRAENAAAKVLELVENAQTDNKRTRKGPRHKQVADRNHQEASKLMGAGTIAXNGGGAPNIDQNSPPNKGAGNGKTDIGTAT

SEQ ID NO: 31004 - protein, 57 aa, Glycine max
  Clone ID: TF_5688045.pep
DAGGRIKKGAGGVKGGGPQKKPGSRPVIAGLQFPVGRFGRYLSEGRLAQRVATGLPI

SEQ ID NO: 31005 - protein, 89 aa, Glycine max
  unsure (1)..(89): unsure at all Xaa locations
  Clone ID: TF_LIB3040-017-Q1-E1-C5.pep
MAPKADRKPVXKKPVEENKSTVGYKAPADIKSAAGEKLPKEGGAGGECMKNKRNKNSVETYXSXIGNVQKHVHTDIGISTKAMGIISRF

SEQ ID NO: 31006 - protein, 86 aa, Glycine max
  Clone ID: TF_uC-gmropic007g05b1.pep
MPGGKGKSSGGKSSGGKTSAAEGTKKQQSHSARAGLQFPCGRVKRFLKQNTQQKMRVGAKAAVYVTAGLEYLTAQVLELAGNAAKD

SEQ ID NO: 31007 - protein, 102 aa, Glycine max
  unsure (1)..(102): unsure at all Xaa locations
  Clone ID: TF_LIB3049-043-Q1-E1-G8.pep
IAYHEAFATCTLNFLTQASFKARTNEAVRKSTGGNDPRKHITTMAGVNSVSTTDXVKTTHHYLLATVALREIMGYQNSTELRMRKLDFQRPVREIAQEVRTD

SEQ ID NO: 31008 - protein, 102 aa, Glycine max
  unsure (1)..(102): unsure at all Xaa locations
  Clone ID: TF_uC-gmroLIB3258P119f12b1.pep
MSTKFVTIVWTNCRWSEEYTLGCIDSVALSETANYQRMTELLMLNLLLHMLNWEVAHELKTXDLCSQIHAVLAWXEAAEVYLVGLFEDTNLCAIHAKRETNY

SEQ ID NO: 31009 - protein, 74 aa, Glycine max
  unsure (1)..(74): unsure at all Xaa locations
  Clone ID: TF_701136208H1.pep
MAGKGGKGFLAEKTREAKKDKDKVKKRPVSGXSRAGIHFPGGRIHRHLNQRVQPNGLLGATAAVNLAPILEYLT

SEQ ID NO: 31010 - protein, 45 aa, Glycine max
  Clone ID: TF_GmC411_4.pep
HASELSKLLGDVTIANGGVMPNIHNLLLPKKAGGSSKGAAADDDS

SEQ ID NO: 31011 - protein, 39 aa, Glycine max
  Clone ID: TF_LIB3049-056-Q1-E1-C3.pep
KLVRESAHDFNTDLRFQSHAVLALLEPAEAYLVGLFEGH

SEQ ID NO: 31012 - protein, 97 aa, Glycine max
  unsure (1)..(97): unsure at all Xaa locations
  Clone ID: TF_LIB3242-257-Q1-J1-B9.pep
MSILSLSNHTRLDSIHKGATLNQLSTNTFLKSSPSTALVKKPHMFMPXTVALMDIKKYHNSTELLIQKLPFQRFFHEIAQDFITHLSFHNITLFFLQ

SEQ ID NO: 31013 - protein, 134 aa, Glycine max
  unsure (1)..(134): unsure at all Xaa locations
  Clone ID: TF_LIB5068-070-A1-XP1-E5.pep
EIRHRTKLTASKCTDXKAARKQLPNKVDRESTTATGGEKETRRLMPKRMTLXRDIQTCHKMTELPIRKLTFXRIAREIAQDCXTDLRCQRSADSVLEEAVEVNLGEIIEDTTHCAILAKRGTTMSKDMPLDRIV

SEQ ID NO: 31014 - protein, 42 aa, Glycine max
  Clone ID: TF_jC-gmro02910047e01d1.pep
KKIAQDIFNLADYKKRPPLSSREIYPRVRIFFPGELAKNPVF

SEQ ID NO: 31015 - protein, 141 aa, Glycine max
  unsure (1)..(141): unsure at all Xaa locations
  Clone ID: TF_LIB4202-003-Q1-K1-F3.pep
MVAGCRKGGGLKNTPVXRYTKAMLQFPVGRIGRCXNKGRSAHRVGTGASEYLGGDIEYLAAQVLEWAGNAARDNXNNRIIPRHXLLALRNNEXLGKWVAGMTIAHGGVLTNMNSVLLPKKTDRACKEPKCTSKATKSPKKA

SEQ ID NO: 31016 - protein, 61 aa, Glycine max
  unsure (1)..(61): unsure at all Xaa locations
  Clone ID: TF_LIB3170-005-Q1-K1-C11.pep
KTHAXKKGGKKKKKRAPKEETGFKVASKPVSNYPVGRIIRYFKKRRCSHRVGTAAPVYLAA

SEQ ID NO: 31017 - protein, 60 aa, Glycine max
  unsure (1)..(60): unsure at all Xaa locations
  Clone ID: TF_jC-gmfl02220064c06a1.pep
VSHAEVLELARNASKDMKSIRKTPRRXQQTICLKEELETLIKGSIAGVGQYLGIHKSMIY

SEQ ID NO: 31018 - protein, 53 aa, Glycine max
  Clone ID: TF_LIB4367-023-R1-K1-D7.pep
WATQDLTPCTKHSCHLGHPSYLDGCTLRVTRIADRPLGEATDPIYPDWHRLTH

SEQ ID NO: 31019 - protein, 77 aa, Glycine max
  Clone ID: TF_10845002.pep
CLSNQTAWMSTPGKAPHKQLATKADRKSAPATGGVNKQHKFRPETVALLEIQNIQRSTATLMAKLPENQSITEIELE

SEQ ID NO: 31020 - protein, 64 aa, Glycine max
  unsure (1)..(64): unsure at all Xaa locations
  Clone ID: TF_jC-gmXLIB3563P053bb05d2.pep
PPPLGFSNKALGIMTSFFHAIFEKVAPEFFKIGRSNKKPPLPSREIXPPVRVFLPGEMAKPPVF

SEQ ID NO: 31021 - protein, 40 aa, Glycine max
  Clone ID: TF_LIB3242-722-P1-K1-G12.pep
EGGAVGEGMKKKRNMMSVVTYKIYIFKVLKQAHLDIGILG

SEQ ID NO: 31022 - protein, 81 aa, Glycine max
  Clone ID: TF_GmC1625_2.pep
MQVLELAGNAARDNKKNRINPRHVLLAVRNDDELGKLLQGVTIASGGVLPNINPVLLPKKSTTAPSEKSSTPKSPKSPKKK

SEQ ID NO: 31023 - protein, 143 aa, Glycine max
  Clone ID: TF_LIB4204-007-R1-N1-H9.pep
PPKRGPQLKFPPNFPPTIPARGKGGKGLGKGAVKRPRKVLRPPIQGLRTPPIRRLPRRGRVKRTSGLISEEPRGVLKIFLDPLIPDPVPPPEHARRKPVPPMDVVYALKSQGSPLYAFWRLKNRIFRFNACVAASPIGSFEFA

SEQ ID NO: 31024 - protein, 119 aa, Glycine max
  Clone ID: TF_LIB3040-009-Q1-E1-E8.pep
QQSNFQTQLQFNNQTSPWFPIQKEVALPSQTAHNSTGGRAPGTQLETKAAHMSARDTGGVKKPQRFRPETVALRDIRLYQKSTDLLMRKLPFQRLVRKIAQDFKTYLRFQSSAVSALQE

SEQ ID NO: 31025 - protein, 93 aa, Glycine max
  unsure (1)..(93): unsure at all Xaa locations
  Clone ID: TF_16282480.pep
GVGKERSKEHRKVFCYNIQGITKPPIGRLVPKGGVKKISGLIYXKTRGVLKIFLENVIRNAVTYTEPAKRKTVPAMDVVYALKRKGRTFYGFG

SEQ ID NO: 31026 - protein, 143 aa, Glycine max
  unsure (1)..(143): unsure at all Xaa locations
  Clone ID: TF_jC-gmXLIB3563P053bb05d3.pep
PGKKAPGGEKVPGGDKGPAGKKPKAGKKLPKKGGPPGKGKKKKRPPKGGGATQIFFFKVLKGGPPPLGFSSRALGFINSFFKDIFEKVAPGFFKIARSTKKPPPPSRGIXPPVRVFLPGELAQPPVFWGAKGVPQFPRFWTGY

SEQ ID NO: 31027 - protein, 99 aa, Glycine max
  unsure (1)..(99): unsure at all Xaa locations
  Clone ID: TF_LIB3039-047-Q1-E1-H1.pep
SILEQEEKHEKTVEKNHVEKVXRKSQAGKKLPXRKTRRKKGEEEKRNKKSVETYKIYIFKVLKQVNPDIGISSKGMGIMNSFINDIFEKLAQESFRLAR

SEQ ID NO: 31028 - protein, 67 aa, Glycine max
  Clone ID: TF_GmC40_15.pep
NSARGIAQDFKTDLRFQSHAVLALQEAAEAYLVGLFEDTNLCAIHAKRVTIMPKDIQLARRIRGERA

SEQ ID NO: 31029 - protein, 116 aa, Glycine max
  Clone ID: TF_LIB3170-009-Q2-K1-H1.pep
ILWILFFKIHTARTKRTARKCTRGKASLKQLATKGERKSVPTTVGVKNPHRYQTGTAALSEIKKYQKSTELLIHKLPLQRMNREIAHDFKTDMLFQSHPTLAFQEADEAYLIRLFD

SEQ ID NO: 31030 - protein, 83 aa, Glycine max
  Clone ID: TF_LIB3049-016-Q1-E1-F3.pep
MARTHPSARMSTGRKAPRKQLATKAARKSAPTTGGVKKPHRYRPGTVALREIRKYQKSTELLIMKLPFQMLVREIAQDFKTDL

SEQ ID NO: 31031 - protein, 140 aa, Glycine max
  unsure (1)..(140): unsure at all Xaa locations
  Clone ID: TF_LIB3092-022-Q1-K1-E10.pep
FLNKCFLVFTRNTSRRPAQFKRAHNSTXLKSPHKHLATNSARNSAPTTDGVNNPYLYLPVTFALLEIIKYHKSTDLLITNLPFHTFLPQIAQNFKTDLLFQIHAILSLQYASXAYLVFLFYDTNFVSIHPKRFTIIPNDI

SEQ ID NO: 31032 - protein, 120 aa, Glycine max
  unsure (1)..(120): unsure at all Xaa locations
  Clone ID: TF_12015491.pep
APKAEKKPVEEKKSTVGDKAPAEKKPXAGMKLLKEGGAGGEGKNMKRIMNSVETYKIYIFNDMKQVHPDIGIXSRAMGVMNMFINNIYLKLVSKSYLLARYVXRLIITCREVETAVKLEL

SEQ ID NO: 31033 - protein, 104 aa, Glycine max
  unsure (1)..(104): unsure at all Xaa locations
  Clone ID: TF_LIB4367-010-R1-N1-C7.pep
PIAAGEKGGRRKRGKKSVETYKIYIXKVXKXHPELVXKQAMGXMNSYQDIXEKVVRNVQTCRYNKKPTIXXREXQTGVRLVLXGELXKHAVXEGTKGVXKLNSC

SEQ ID NO: 31034 - protein, 79 aa, Glycine max
  unsure (1)..(79): unsure at all Xaa locations
  Clone ID: TF_uC-gmflLIB3260P039c07a1.pep
KQGPPALGISNKALGIINSFIKAIFXKLVQEFFKFARFNKKPPLPSREIHTPVRIFLPGELAKHPVFXGTKAVPKFTRF

SEQ ID NO: 31035 - protein, 129 aa, Glycine max
  Clone ID: TF_GmC1341_4.pep
MWLSCSTMKPYKADEETFESSHEAFKSAFPRGFAWEVIKVYSGPPEIAFKFRHWGFFEGPFKGHAPTGKMAQFYGLGTVKVDDSLKVEEVEIYYDPAELLGGLLSGNHEARDSASGATWWREAYQWSHL

SEQ ID NO: 31036 - protein, 115 aa, Glycine max
  unsure (1)..(115): unsure at all Xaa locations
  Clone ID: TF_7233625.pep
RNTENGKNSDAEKKPIWKAGRSNLELRVQRIAGVGRRRNTLTYRTKAPIYLATLLKYVATGRRELTXNTTRDNRKDGIIPRHVLLARRSDEEWEKVLTGVTRTHGNGLANISPVV

SEQ ID NO: 31037 - protein, 114 aa, Glycine max
  unsure (1)..(114): unsure at all Xaa locations
  Clone ID: TF_LIB3242-704-P1-K1-A9.pep
MARTKQTARKITGGKAAKKQLSTKAERKSAPTTGGVKKPDRYRPGTDALREIRKYQKSTELLIRKLPFQRVVQEIXAQDFKTDLRXQSHAVLALQEAADAYLDGLYEDTNLCAI

SEQ ID NO: 31038 - protein, 129 aa, Glycine max
  Clone ID: TF_LIB3170-032-Q1-K1-A8.pep
DYIFFFLCILFIQGSGGFFWKRPKYFKIARTKQTAPKSTAGKAPIKHLTTNAARKSAPTTADVNNPHRYRPETVALHEIMKYQNSTELLIKKLSFHKLNPEIAQDFKTDLRLQSHAVLALQEAYEAYLF

SEQ ID NO: 31039 - protein, 80 aa, Glycine max
  Clone ID: TF_LIB4204-012-R1-N1-E12.pep
QTACKSPGGKAPRKQLATKTVFKLAPGTGGVKKPPRFRPGTVVFRGFLKFPKSPELFFRKLPFQRFVKEIVQVFKTVFRF

SEQ ID NO: 31040 - protein, 122 aa, Glycine max
  unsure (1)..(122): unsure at all Xaa locations
  Clone ID: TF_LIB3049-054-Q1-E1-D7.pep
MHIHYLFSKSLIVLKAPVMEEKKPAENKPASENVTVEKNPNADNKISTEGRSXKYTMRTMKSVETYKMYILKVLKQVQPDIGISISAMGSMNSFINDLLYNLALEALRLARFDMNPKITSRE

SEQ ID NO: 31041 - protein, 107 aa, Glycine max
  unsure (1)..(107): unsure at all Xaa locations
  Clone ID: TF_jC-gmX3040038G02sg9C1b1.pep
HTNRKCTRGKAPLKQLEPKAGRLCVPTTGGVTKPTLYRTGTSAVQWSKTYHKSAELLIRPLPFQRLDREIGXDCXTDLRIQSRTELALQEAPYAYLDGLCVDTNLCA

SEQ ID NO: 31042 - protein, 134 aa, Glycine max
  unsure (1)..(134): unsure at all Xaa locations
  Clone ID: TF_uC-gmflLIB3275P077d12b1.pep
SRSKRTPTTRTFGEAPTNTVATKTDRKSXPATVGLNKPXRFKPGTVGLEDIRQCLKSTELLILELPFRMLFTKINHDFKTYLQFQSTDVSDLEETADDYLYGLLNDTKLCDIYAKRVTIMPKDMKLARRIISDR

SEQ ID NO: 31043 - protein, 103 aa, Glycine max
  unsure (1)..(103): unsure at all Xaa locations
  Clone ID: TF_LIB3040-041-Q1-E1-E10.pep
MARFKHNALKSTRGYAXTKQLATEAARISATATGGVKTPHRYHPVNVALRVIKLYLKITDLLMRNLSFQXLVLEIAHDVTTDMRFXSHAVLALQGTAVAFLVR

SEQ ID NO: 31044 - protein, 122 aa, Glycine max
  unsure (1)..(122): unsure at all Xaa locations
  Clone ID: TF_LIB3040-010-Q1-E1-F10.pep
MSEHSTSVPLRKHNQKLLTKSQIFLGAPAKAEKKPAEKKPAEEKAPAENKPNADTKISNERGSDKNKNRTMKSVETXMIYIFKVLKHVHPDIGISSRAMGIMNSFINDIFEKLAQDASRWAR

SEQ ID NO: 31045 - protein, 89 aa, Glycine max
  Clone ID: TF_jC-gmle01810041e09d1.pep
LNQRVQPNGRVGATAAVFLASILENLTSKVLNLAGNLTKIFKVKRIPPRPLQLAIRGDEKLSPLIKGPLPGGGVIPPIPKPLINKVAKK

SEQ ID NO: 31046 - protein, 94 aa, Glycine max
  unsure (1)..(94): unsure at all Xaa locations
  Clone ID: TF_LIB3065-016-Q1-N1-E12.pep
SCTAFRNQTQIYRTEQSAHKFTGXKAPTKHLATKAARKSAPTTGVVNKPHRIRPGTVALREIRKYHKSTELLIRKLPFHRLIREIAHDFKTDLH

SEQ ID NO: 31047 - protein, 97 aa, Glycine max
  Clone ID: TF_LIB3039-046-Q1-E1-C12.pep
MSGRGKGGKGLGKGGATRHRKVLRDNIHGITKPAIRRLARMGGVKRISGLIYEETRGVLKMTEGGAQVSLLIEISRTSVMNMNVPVIFVATNLVAWQ

SEQ ID NO: 31048 - protein, 97 aa, Glycine max
  unsure (1)..(97): unsure at all Xaa locations
  Clone ID: TF_LIB3049-054-Q1-E1-A10.pep
MARTKQTARKSTGRKAPXKQLANKAARKSAPTTGGVKKPHRYRPGTVALREIXKYQKSTELLIRKLPFQKLVREIAQDFKTDLRFQSHAVLALQEAA

SEQ ID NO: 31049 - protein, 80 aa, Glycine max
  Clone ID: TF_LIB3242-095-Q1-J1-E12.pep
RSTQLLIRKLPLHRLVREIDQDLNTDLRYQSHAVLALQEAADAYLAGLFEDTNLCAMHAKRVTIMPKDIQLARRILGERA

SEQ ID NO: 31050 - protein, 116 aa, Glycine max
  unsure (1)..(116): unsure at all Xaa locations
  Clone ID: TF_LIB3170-017-Q1-K1-H8.pep
MEAPPKGAAIRRGDRNKSGSKYINAGVQFHLCRVVSYXKKGRLCCRLGTGATIYLPAVLEYVVAEKQKLAGNAARDNQKNKINPLHMLLAERNDHELWKLLLGVTIDSGGMKPNIN

SEQ ID NO: 31051 - protein, 124 aa, Glycine max
  unsure (1)..(124): unsure at all Xaa locations
  Clone ID: TF_LIB3106-096-Q1-K1-A12.pep
MARTKQTARKSTAGTAPKKQLASXAARKSAPATAGVKKPHRYGSXTSATRETMKYQNSTELLITKLALQRLVREYCHYFKTDLRXQSHAELALQEADEAXPYELXEDTNSCAIHAKRVTIMPKD

SEQ ID NO: 31052 - protein, 123 aa, Glycine max
  unsure (1)..(123): unsure at all Xaa locations
  Clone ID: TF_jC-gmXLIB3563P075bc11a2.pep
MARTKQTARKSTGXGKAPRKQLATKAARKSAPTTGGVKKPHRYRPGTVALREIRKYQKSTELLIRKLPFQRLVREIAQDFETDLRFQSHAVLALQEAAEAYLVGLFEDTNLCAIYAKRVNIIP

SEQ ID NO: 31053 - protein, 92 aa, Glycine max
  unsure (1)..(92): unsure at all Xaa locations
  Clone ID: TF_6725068.pep
GAVKKFYCYSSGTVVLREIRKYXKSIELLIRKLPFXRLVREIAXDFKIDLRFQSHXVIAXXEAVEAYLVGLFEDINLCAIYVKRVIIMLKDI

SEQ ID NO: 31054 - protein, 148 aa, Glycine max
  unsure (1)..(148): unsure at all Xaa locations
  Clone ID: TF_GmC45_9.pep
MDAGGKIKKGAGGRKGGGPKKKPVSRSVKAGLQFPVGRIGRYLKKGRYAQRVGTAAPVYLAAVLEYLAAEVLELAGNARDNKKXRSIPRHVLLAVRNDEELGKLLAGVTIAHGGVLPNINPVLLPKKTERAAKEPKSPSKGTKSPKKA

SEQ ID NO: 31055 - protein, 136 aa, Glycine max
  Clone ID: TF_uC-gmflminsoy091f03b1.pep
MARTKQTARKSTGGKAPRKQLATKAARKSAPTTGGVKKPHRYRPGTVALREIRKYQKSTELLIRKLSFQRLVREIAQDFKTDLRFQSHAVLALQEAAEAYLVGLYEDTNLCAIHAKRVTIMPKDIQLARRIRGERA

SEQ ID NO: 31056 - protein, 136 aa, Glycine max; identical to SEQ ID NO: 6888
  Clone ID: TF_GmC1224_1.pep

SEQ ID NO: 31057 - protein, 136 aa, Glycine max; identical to SEQ ID NO: 6888
  Clone ID: TF_GmC127_1.pep

SEQ ID NO: 31058 - protein, 136 aa, Glycine max; identical to SEQ ID NO: 6888
  Clone ID: TF_GmC127_2.pep

SEQ ID NO: 31059 - protein, 136 aa, Glycine max; identical to SEQ ID NO: 6888
  Clone ID: TF_GmC1607_1.pep

SEQ ID NO: 31060 - protein, 136 aa, Glycine max; identical to SEQ ID NO: 6888
  Clone ID: TF_GmC1638_1.pep

SEQ ID NO: 31061 - protein, 192 aa, Glycine max
  Clone ID: TF_GmC1655_1.pep
MARTKQTARKSTGGKAPRKQLRHQGSTQVRDITLSLLQSQLIAFFFFQRESVFVFQMARTKQTARKSTGGKAPRKQLATKAARKSAPATGGVKKPHRFRPGTVALREIRKYQKSTELLIRKLPFQRLVREIAQDFKTDLRFQSSAVSALQEAAEAYLVGLFEDTNLCAIHAKRVTIMPKDIQLARRIRGERA

SEQ ID NO: 31062 - protein, 136 aa, Glycine max; identical to SEQ ID NO: 6888
  Clone ID: TF_GmC1655_2.pep

SEQ ID NO: 31063 - protein, 136 aa, Glycine max; identical to SEQ ID NO: 6888
  Clone ID: TF_GmC1680_1.pep

SEQ ID NO: 31064 - protein, 136 aa, Glycine max; identical to SEQ ID NO: 6888
  Clone ID: TF_GmC1680_2.pep

SEQ ID NO: 31065 - protein, 175 aa, Glycine max
  Clone ID: TF_GmC578_1.pep
MARTKQTARKSTGGIAKSFLQFNHHCTTQFPSSFSIKRAMARTKQTARKSTGGKAPRKQLATKAARKSAPATGGVKKPHRFRPGTVALREIRKYQKSTELLIRKLPFQRLVREIAQDFKTDLRFQSSAVSALQEAAEAYLVGLFEDTNLCAIHAKRVTIMPKDIQLARRIRGERA

SEQ ID NO: 31066 - protein, 136 aa, Glycine max; identical to SEQ ID NO: 6888
  Clone ID: TF_GmC578_2.pep

SEQ ID NO: 31067 - protein, 136 aa, Glycine max; identical to SEQ ID NO: 6888
  Clone ID: TF_GmC913_1.pep

SEQ ID NO: 31068 - protein, 137 aa, Glycine max
  Clone ID: TF_GmC1626_1.pep
MAKGEKKPAEKKPAEKAPAEKTKAEKKIPKEPASGEKKKKKRNKKSVETYKIYIFKVLKQVHPDIGISSKAMGIMNSFINDIFEKLAQESSRLARYNKKPTITSREIQTAVRLVLPGELAKHAVSEGTKAVTKFTSS

SEQ ID NO: 31069 - protein, 137 aa, Glycine max; identical to SEQ ID NO: 31068
  Clone ID: TF_GmC1626_2.pep

SEQ ID NO: 31070 - protein, 119 aa, Glycine max
  unsure (1)..(119): unsure at all Xaa locations
  Clone ID: TF_LIB3028-002-Q1-B1-F11.pep
MAPAAEKKPAEKKPAEEKKSTVGDKAPAENKPXAGKKLPKEGGAGGXRKKKKRNMKSVETYKIYIFKVLKQVHPDIGISSNAMGIMNSFINDIFYKLAQESSILARYNKNRNITSREIQ

SEQ ID NO: 31071 - protein, 81 aa, Glycine max
  Clone ID: TF_LIB3054-001-Q1-B1-C7.pep
QKSTELLIRKLPFHRLVREIAQYFKTDLRFQSHAVLALQEAAEAYRVGLFEDTNLCANHAKRVTIMPKDIQLARKIRGERA

SEQ ID NO: 31072 - protein, 106 aa, Glycine max
  Clone ID: TF_LIB5068-035-A1-XP1-G6.pep
MTAGIEKNNIRTINTVDTYEIYIFPVLPKVHPDIGISMNVMFIMNSFINDVFNKLAQHASRLPLYNWKPTITSRDIQTSVRLVLPDELCKLAASECTKESTKITSS

SEQ ID NO: 31073 - protein, 111 aa, Glycine max
  Clone ID: TF_LIB3170-020-Q1-K1-H3.pep
MNLVGERKTITISGIGKGGRGLGKGGAKRHPKGLRDNIQRITKTAIRRLARRGTVKRINGLMYEETRSVLKILLQNVIRDAGTYTEHARRKTENAMDDGYSLQTQDKTLYR

SEQ ID NO: 31074 - protein, 114 aa, Glycine max
  unsure (1)..(114): unsure at all Xaa locations
  Clone ID: TF_jC-gmX3040037G03sg8F24b1.pep
TKGGEQKNQQSGRPKKKPVSRSVKAGLQFPVGRIGRFLKKGRFSQRVGTGAPVYLGAVLESLSAKVLXLAGNASLDNKKNRIFPRPLLFALRNXKXLGKLLAGVPIAQWWLASN

SEQ ID NO: 31075 - protein, 134 aa, Glycine max
  Clone ID: TF_6667484.pep
RTKQTARKCTGGKAPRKQLATKAARKSAPTTGGVKKPHRYRPETEALRERRRYQRTTELLIRKLPFQRLVREIAHDFKTDLRCQSRAVLALQEAAEAYLVGLCDDTNLCAVNAKRVTIMPKDSELAREIPGERA

SEQ ID NO: 31076 - protein, 139 aa, Glycine max
  Clone ID: TF_GmC128_3.pep
MASHDKAQGSSTTKKGISRSNKAGLQFPVGRVARYLKTGKYAERISSAAPVYLASVLEYLAAEVLELAGNAVMDNKKTRIMPRHIQLAVRNDEELNKLLGDVTIANGGVMPNIHSMLLPKKVGTSTSTFMGASVNDNDA

SEQ ID NO: 31077 - protein, 71 aa, Glycine max
  unsure (1)..(71): unsure at all Xaa locations
  Clone ID: TF_LIB3242-505-P1-J1-D11.pep
LELAGNAARVYKKTRIVPRDIQLAVGNDXELSMLLGDVTIANGGVMPNIHNLLLPKKAGGSSKAAAADDDS

SEQ ID NO: 31078 - protein, 315 aa, Glycine max
  unsure (1)..(315): unsure at all Xaa locations
  Clone ID: TF_GmC411_7.pep
SANADSDSFEMELDKDDEMTTLSETGCDTEEQESTSSEELDELAISRDMPHLYPRPHISCNEAVSKWKLKGKRNNRNLVKRSVGAADGKGVVLYEADVEGLRSRLNHKRLVPSMHYYGNGISDVFADTDQMFGFEDEYSPTSKALAKGQNKIGHGVDWDEWAWEDQTAFKGYWENKGFARLYSDSYHFDGRMRSMLVDVDLKVQASYRKAPVPIVSITSKLDGKSIIGHPIQIESLKDGSSDKLFSAIDDXSNDGNGFEGSSVLPPAWRTAXETXTTNVFLVPVSSHLLVLKVMHSSAHISNENLTTSTEHNYQN

SEQ ID NO: 31079 - protein, 118 aa, Glycine max
  Clone ID: TF_LIB4164-023-Q1-K1-A7.pep
EAACTKAARKSAPTTGGVKKPHRYRPGTVALREIRKYQKSTELLIRKLPFQRLVREIAQDFKTDLRFQSHAVLALQEAAEAYLVGLFEDTNLCAIHAKRVTIMPKDIQLARRIRGERA

SEQ ID NO: 31080 - protein, 101 aa, Glycine max
  unsure (1)..(101): unsure at all Xaa locations
  Clone ID: TF_LIB3040-029-Q1-E1-D5.pep
MAPAKAEKKPAEKKPAEKAPAEKKPKAEKKXISREGGSEKKKKRIKNSVETXDIYIIRVXKHVDHDMGISSKAMGDMRSFINDIFEKLAQESSRPARYNKK

SEQ ID NO: 31081 - protein, 117 aa, Glycine max
  unsure (1)..(117): unsure at all Xaa locations
  Clone ID: TF_jC-gmfl02220091h12a1.pep
MARTKQTVRKSTGGKAPKKHLATKAARQTVPTTGGVKKPNSYRPGTVALREIRKYQKSTALLFKKLTFHEVXREIAQDXRTELRQQSHAVLALQEAVEAYLVGLFEDTNLGAINDKR

SEQ ID NO: 31082 - protein, 97 aa, Glycine max
  unsure (1)..(97): unsure at all Xaa locations
  Clone ID: TF_10842835.pep
SGKGAKGLITAKDKYKKKPISRSSTSSLHFPVEHIHHLLKSKVTAHKRVKATTTFYSTTILNYLTTXVLKLTNNASKDLKVNHITPIHLQLTIHKYK

SEQ ID NO: 31083 - protein, 78 aa, Glycine max
  unsure (1)..(78): unsure at all Xaa locations
  Clone ID: TF_LIB4202-005-Q1-K1-B9.pep
MAGGGITLGSNAAKKATXRSRKAGLQFPVXRIGRVLKGGKNTKRVDTEAHKYLDDVVGYVASEVXELGGNAGRDDMKT

SEQ ID NO: 31084 - protein, 143 aa, Glycine max
  unsure (1)..(143): unsure at all Xaa locations
  Clone ID: TF_GmC1660_5.pep
MARTKQTARKSTGGKAPRKQLATKAARKSAPTTGGVKKPHRYRPGTVALREIRKYQKSTELLIRKLPFQRLVREIAQDFKQITDIFXTDLRFQSHAVLALQEAAEAYLVGLFEDTNLCAIHAKRVTIMPKDIQLARRIRGERA

SEQ ID NO: 31085 - protein, 60 aa, Glycine max
  Clone ID: TF_LIB3108-050-Q1-K1-B1.pep
MDAGCKITKGAAGRKGGGPKKKPLSRSVKAGLHIPVGRIGRYLKKGRYSQRVCTGAPVYL

SEQ ID NO: 31086 - protein, 63 aa, Glycine max
  unsure (1)..(63): unsure at all Xaa locations
  Clone ID: TF_700980281H1.pep
QDFKTDLRFQSHAVLALQEAAEAYXVGLFEDTNLCAIHASRVTIMPRYSAGKKVRGDVLSCGR

SEQ ID NO: 31087 - protein, 97 aa, Glycine max
  unsure (1)..(97): unsure at all Xaa locations
  Clone ID: TF_GmC127_3.pep
PRFRPGTVALREIRKYQKSXELLIRKLPFQRLVREIAQDFKTDLRFQSSAVSALQEAAEAYLVGLFEDTNLCAIHAKRVTIMPKDIQLARRIRGERA

SEQ ID NO: 31088 - protein, 171 aa, Glycine max
  unsure (1)..(171): unsure at all Xaa locations
  Clone ID: TF_GmC1230_4.pep
ANSNSQFPIRNPYSFQRTKLSDRDGTKAEKKPAEKKPAEEKKSTVGDKAPAEKKPXAGKKLPKEGGAGGEGKKKKRNKKSVETYKIYIFKVLKQVHPDIGISSKAMGIMNSFINDIFEKLAQESSRLARYNKKPTITSREIQTAVRLVLPGELAKHAVSEGTKAVTKFTSS

SEQ ID NO: 31089 - protein, 144 aa, Glycine max
  Clone ID: TF_GmC110_2.pep
MSSTEVAATTKKGGRGKPKTTKSVSRSSKAGLQFPVGRVARYLKAGRYAQRVGSGSPVYLSAVLEYLAAEVLELAGNAARDNKKTRIVPRHIQLAVRNDEELSKLMGSVTIANGGVLPNIHQNLLPKKAAGKGKPEIGSASQEF

SEQ ID NO: 31090 - protein, 139 aa, Glycine max
  Clone ID: TF_GmC732_1.pep
MAPAKAEKKPAEKKPAAEKAPAEKKPKAEKKISKEGGSEKKKKRTKKSVETYKIYIFKVLKQVHPDIGISSKAMGIMNSFINDIFEKLAQEASRLARYNKKPTITSREIQTAVRLVLPGELAKHAVSEGTKAVTKFTSS

SEQ ID NO: 31091 - protein, 149 aa, Glycine max
  unsure (1)..(149): unsure at all Xaa locations
  Clone ID: TF_GmC45_2.pep
MDAGGKIKKGAGGRKGGGPKKKPVSRSVKAGLQFPVGRIGRYLKKGRYAQRVGTGAPVYLAAVLEYLAAEVLELAGNAARDNKKNRIIPRHVLLAVRNDEELGKLLAGVTIAHGGVLPNINPVLLPKKTERAXKEPKSPSKATKSPKKA

SEQ ID NO: 31092 - protein, 110 aa, Glycine max
  unsure (1)..(110): unsure at all Xaa locations
  Clone ID: TF_LIB3053-009-Q1-N1-B6.pep
MTLTLSIRTASICSWRLTISLNGSIGLITRKTSAAIKDRDXKKPISCTHSAVLQFTAGXIHRLMKSMTAAHDRFWATSAVYYAAILEYLTAEVLHLARNASKDLIVKRIT

SEQ ID NO: 31093 - protein, 85 aa, Glycine max
  unsure (1)..(85): unsure at all Xaa locations
  Clone ID: TF_LIB3039-015-Q1-E1-B9.pep
QRRSYEQLQQCSTESAPATVSVKQPHRXHPASVTLREIRPYHTSTELMIRKLPFQTLVPDITQDFKTDLHFQIHTVLALHEPADA

SEQ ID NO: 31094 - protein, 92 aa, Glycine max
  Clone ID: TF_LIB3051-079-Q1-K1-C3.pep
MARTKQTARKSTGGKAPRKQLATKAARKSAPTTGGVKKPHRYRPGTVALREIRKYQKSTELLIRKLPFQRLVREIAQDFKTDLKFQSHAVLA

SEQ ID NO: 31095 - protein, 62 aa, Glycine max
  unsure (1)..(62): unsure at all Xaa locations
  Clone ID: TF_uC-gmroLIB3259128g02a1.pep
LIFCQQGGIPPRKQLRTXAPRKYVPATGGTTKPKRYLPGTVALRVIRTYQNTTDLLIKKLTL

SEQ ID NO: 31096 - protein, 98 aa, Glycine max
  Clone ID: TF_GmC137292_1.pep
ERFYCCLFEIDVSEITFWASTQMARTKQTARKSTGGKAPRKQLATKAARKSAPTTGGVKKPHRYRPGTVALREIRKYQKSTELLIRKLPFQRLVREIA

SEQ ID NO: 31097 - protein, 122 aa, Glycine max
  Clone ID: TF_GmC1607_2.pep
MARTKQLATKAARKSAPATGGVKKPHRFRPGTVALRGIRKYQKSTELLIRKLPFQRLVREIAQDFKTDLRFQSSAVSALQEAAEAYLVGLFEDTNLCAIHAKRVTIMPKDIQLARRIRGERA

SEQ ID NO: 31098 - protein, 80 aa, Glycine max
  Clone ID: TF_LIB4366-015-R1-K1-C10.pep
EYLAADVLELVPNTVRNNTKTRIVAMHIILVARNHVELSALMGSATIAIGGALANIYHNLMPKKVAVQGKPHTGSASQEI

SEQ ID NO: 31099 - protein, 117 aa, Glycine max
  unsure (1)..(117): unsure at all Xaa locations
  Clone ID: TF_LIB4367-014-R1-K1-H4.pep
RGEGKKKKRNKKSVETYKIYMFKGLKQVHPDIGISSEAMGIMNSFINDIFEKLAQESSRLARYNKKPTITSRERGTAXRLXLPGGGGGGGGGGGGGGGRAGGGGGGGGGGGGGGGGG

SEQ ID NO: 31100 - protein, 123 aa, Glycine max
  unsure (1)..(123): unsure at all Xaa locations
  Clone ID: TF_7589938.pep
PAEKKPKAKKKLPKEGRAGGERGKKKKKNKKSVETYKIYICKVLKQVHPNINISSKAMGIINSFINNIFEXLTQESCRLAHYNKXPTITSKEIQTTIKLMLPGKLTKHXMSKDTETITKWTSS

SEQ ID NO: 31101 - protein, 123 aa, Glycine max
  unsure (1)..(123): unsure at all Xaa locations
  Clone ID: TF_LIB3108-045-Q1-K1-E12.pep
SFEILRTKQTARKGRLXKAPMKQLASNAARKSAPTTGGVKKPHRYRPGTVALREIRKYHKSTELLIRKLPFQRLVREIAHDFKTDLRFQSHSVLALQEAAEAYXVGLFEDTNLCAIHAKRVTI

SEQ ID NO: 31102 - protein, 138 aa, Glycine max
  Clone ID: TF_GmC958271_1.pep
LAVARSKQTARESTGGKAPRKQLATKAAPKSAPSAGGVNKPHRDRPGAVALREIRRYQKSTELLIRKLPFQRLVREIAQDFKTDLRFQSAAIGALQEASEAYLVGLFEDTNLCAIHAKRVTIMPNDIQLARRIRGERA

SEQ ID NO: 31103 - protein, 148 aa, Glycine max
  Clone ID: TF_GmC1230_16.pep
MAPKAEKKPAEKKPAEEKKSTVGDKAPAEKKPKAGKKLPKEGGAGGEGKKKKRNKKSVETYKIYIFKVLKQVHPDIGISSKAMGIMNSFINDIFEKLAQESSRLARYNKKPTITSREIQTAVRLVLPGELAKHAVSEGTKAVTKFTSS

SEQ ID NO: 31104 - protein, 149 aa, Glycine max
  Clone ID: TF_GmC1230_18.pep
MAPKAEKKPAEKKPAEEKKSTVGDKAPAEKKPKAGKKLPKEGGAGGEGGKKKKRNKKSVETYKIYIFKVLKQVHPDIGISSKAMGIMNSFINDIFEKLAQESSRLARYNKKPTITSREIQTAVRLVLPGELAKHAVSEGTKAVTKFTSS

SEQ ID NO: 31105 - protein, 143 aa, Glycine max
  Clone ID: TF_GmC1230_19.pep
MAPKAEKKPAEEKKSTVGDKAPAEKKPKAGKKLPKEGGAGGEGKKKKRNKKSVETYKIYIFKVLKQVHPDIGISSKAMGIMNSFINDIFEKLAQESSRLARYNKKPTITSREIQTAVRLVLPGELAKHAVSEGTKAVTKFTSS

SEQ ID NO: 31106 - protein, 148 aa, Glycine max; identical to SEQ ID NO: 31103
  Clone ID: TF_GmC1230_20.pep

SEQ ID NO: 31107 - protein, 148 aa, Glycine max
  Clone ID: TF_GmC1230_21.pep
MAPKAEKKPAEKKPVEEKKSTVGDKAPAEKKPKAGKKLPKEGGAGGEGKKKKRNKKSVETYKIYIFKVLKQVHPDIGISSKAMGIMNSFINDIFEKLAQESSRLARYNKKPTITSREIQTAVRLVLPGELAKHAVSEGTKAVTKFTSS

SEQ ID NO: 31108 - protein, 149 aa, Glycine max
  Clone ID: TF_GmC1230_24.pep
MAPKAEKKPAEKKPVEEKKSTVGDKAPAEKKPKAGKKLPKEGGAGGEGGKKKKRNKKSVETYKIYIFKVLKQVHPDIGISSKAMGIMNSFINDIFEKLAQESSRLARYNKKPTITSREIQTAVRLVLPGELAKHAVSEGTKAVTKFTSS

SEQ ID NO: 31109 - protein, 148 aa, Glycine max; identical to SEQ ID NO: 31103
  Clone ID: TF_GmC1230_27.pep

SEQ ID NO: 31110 - protein, 149 aa, Glycine max; identical to SEQ ID NO: 31108
  Clone ID: TF_GmC1230_5.pep

SEQ ID NO: 31111 - protein, 110 aa, Glycine max
  unsure (1)..(110): unsure at all Xaa locations
  Clone ID: TF_LIB3093-050-Q1-K1-G7.pep
MARTKHTARMSTXCEAPRKHLATNAARKSAPTTGGVNKPYINPTGTVALHEIRKYHISSELLIRKLLLQRLGREIAHDFKTDLQLQSHAVLXALHEATDAFIVGLNEDTN

SEQ ID NO: 31112 - protein, 91 aa, Glycine max
  Clone ID: TF_700944518H1.pep
QRPKYFEMARTKQTARKSTGGKAPRNQLANNAARKSEPTTGAVKKPHRYRPGTVPLREIRTYQISAVLLIRNLHIQMLVREIAQDFKTDLR

SEQ ID NO: 31113 - protein, 116 aa, Glycine max
  unsure (1)..(116): unsure at all Xaa locations
  Clone ID: TF_LIB3040-006-Q1-E1-A8.pep
DPLYSILQNSCTAFRKHTYIARRNQTARKSTRXKAPMKQLATNAARKSAPTTGDVNKPHRYRPDTVALREIRTYQNSTELLIRKLLFQKLVREIAQDFKTDLRFQSHALLAMQETA

SEQ ID NO: 31114 - protein, 113 aa, Glycine max
  unsure (1)..(113): unsure at all Xaa locations
  Clone ID: TF_LIB4204-003-R1-K1-B3.pep
IISTVPKWTLAERSRTAPEEETALRPKKKPGLRSCIGGLNYPTGXIGHYLKKXKNAQRAQTSAPVYLAAFLEYLNTEELELTGNSXRDNKKNRIIARHVLLAVKNDEELGKLL

SEQ ID NO: 31115 - protein, 97 aa, Glycine max
  Clone ID: TF_LIB3074-039-Q1-K1-H10.pep
MARTKQTARKSTGGKAPMKQLATKAARKSAPTTGGVKKPHRYRPGTVALREIRKYHKNTELLIRKLPFQRLVREIAQDFKTDLPFQNHAVLSFQEAS

SEQ ID NO: 31116 - protein, 158 aa, Glycine max
  unsure (1)..(158): unsure at all Xaa locations
  Clone ID: TF_GmC45_7.pep
MDAGGKIKKGAGGRKGGGPKKKPVSRDSXGSNNKXXPXGFLQFPVGRIGRYLKKGRYAQRVGTGAPVYLAAVLEYLAAEVLELAGNAARDNKKNRIIPRHVLLAVRNDEELGKLLAGVTIAHGGVLPNINPVLLPKKTERAAKEPKSPSKATKSPKKA

SEQ ID NO: 31117 - protein, 77 aa, Glycine max
  unsure (1)..(77): unsure at all Xaa locations
  Clone ID: TF_LIB3106-049-Q1-K1-H12.pep
RKVHIPKKKPFSRSVKAGLQFPVGRIGRYLKKGTYAQRVSTRAPVYLAAVLEXLTADVLELAWNAARDNNKNRIIPR

SEQ ID NO: 31118 - protein, 122 aa, Glycine max
  unsure (1)..(122): unsure at all Xaa locations
  Clone ID: TF_LIB3242-761-P1-J1-F5.pep
MARTKHTARKSTGGKASRKHLATKAARKSAPTTGGVKKPHRYRPGTVALREIXRKYQKSSXLLIRKLSFHRLVREIAQDFKTDLCIQSHAVLALXEAAEAYLDGLFEDTNLCXAIHAKRVTI

SEQ ID NO: 31119 - protein, 109 aa, Glycine max
  unsure (1)..(109): unsure at all Xaa locations
  Clone ID: TF_LIB3073-018-Q1-K1-G7.pep
MAPAKALKKPAENKPAAENAPAEKKPEAANTISKEGWSXKKKKHTKKNLETYKIYIFNVLKQVHRDIGIYSKAMGIMNSFINDIFDKLAQEASRLARYYKMPTITSREI

SEQ ID NO: 31120 - protein, 67 aa, Glycine max
  Clone ID: TF_LIB3049-012-Q1-E1-F3.pep
MGRTKQTARKSTGGKAPRKQLATKAARKSAPTTGGVKKPHRYRPGTVAPREITKYQKSTELLIKKLP

SEQ ID NO: 31121 - protein, 91 aa, Glycine max
  Clone ID: TF_GmC335946_1.pep
LREIRRYQKSTDLLLLKLPFSRLVREVAYNVAPASLEGHRWQSQAIQALQEAAEAFLVHLFEDTNLCALHAKRVTIMQKDIQLARRLRGAL

SEQ ID NO: 31122 - protein, 64 aa, Glycine max
  Clone ID: TF_9205495.pep
REIAHDFKTELRCQSHAVLALQDAAEAYLVGLFEDTNLCAIHSKRVTIMPKDIHLARTIRGERA

SEQ ID NO: 31123 - protein, 134 aa, Glycine max
  unsure (1)..(134): unsure at all Xaa locations
  Clone ID: TF_18734538.pep
RTKQTAXKPTGGKXPRKQQAXKAARKXXPATGGEKKAHRGRPGTAGQRETRKHQKRIFFLNQKQPIKRMDRDKAQESKTDLRFQSKAEPAAQEAAEGYPEGILRRQNIGGIHARRVPIMPKDNQIARRTKGERA

SEQ ID NO: 31124 - protein, 66 aa, Glycine max
  Clone ID: TF_10845090.pep
YKVLIQVHLDIGIFRNAMGYMNSFMTTCLRRSAIGLSICHRYNKKLTISSREILSAVRLVLSVDLC

SEQ ID NO: 31125 - protein, 74 aa, Glycine max
  unsure (1)..(74): unsure at all Xaa locations
  Clone ID: TF_700971521H1.pep
MARTKQTXRKSTXGKXPRKQXATKAARKSAPTTGXVKKPXRYRPGXTVALXEIRXYQKSTELLIRKLPSRGWFN

SEQ ID NO: 31126 - protein, 113 aa, Glycine max
  unsure (1)..(113): unsure at all Xaa locations
  Clone ID: TF_LIB3242-401-P1-J1-B5.pep
MAPPMAEKKPAEKKXAEKAGAEKKPKAXKKISKEGGSEKIKKRTKKSVETYKMYIFKVLKQVHPDIGISSKAMGIMNRSIYDISEKLAQESLRMARYNKNPTINFREIQTAER

SEQ ID NO: 31127 - protein, 114 aa, Glycine max
  Clone ID: TF_GmC136_3.pep
MSGKGAKGLITGKTSAANNKDKDKKKPISRSSRAGLQFPVGRIHRLLKSRTTANGRVGATAAVYSAAILEYLTAEVLELAGNASKDLKVKRITPRHLQLAIRGDEELDTLIKGT

SEQ ID NO: 31128 - protein, 143 aa, Glycine max
  Clone ID: TF_jC-gmfl02220051a07a1.pep
MARTKQTARKSTGGKAPRKQLATKAARKSAPTTGGVKKPHRYRPGTVALREIRKYQKSTELLIRKLPFQRLVREIAQDFKTDLRFQSHAVLALQEAAEAYLVGLFEDTNLCAIHAKRVTIMPKDIQLARRIRGEPCLNWWFGR

SEQ ID NO: 31129 - protein, 144 aa, Glycine max
  Clone ID: TF_GmC1625_1.pep
MEAPPKGAAGRRGDRKKSVSKSIKAGLQFPVSRVARYLKKGRYSRRLGTGAPIYLAAVLEYLAAEVLELAGNAARDNKKNRINPRHVLLAVRNDDELGKLLQGVTIASGGVLPNINPVLLPKKSTTAPSEKSSTPKSPKSPKKK

SEQ ID NO: 31130 - protein, 97 aa, Glycine max
  Clone ID: TF_LIB3167-003-P1-K1-C9.pep
MAKGEKKPAEKKPAAEKAPAEKTKAEKKIPKDAASGEKKKKRTKKSVETYKIYIFKVLKQVHPDIGISSKAMGIMNSFINDIFEKLAQESSRLARYN

SEQ ID NO: 31131 - protein, 107 aa, Glycine max
  unsure (1)..(107): unsure at all Xaa locations
  Clone ID: TF_LIB3028-015-Q1-B1-D2.pep
PFPPHCESLSIAHASAHYSPSDKKPASNGPXEKKPXVXVKVSMERGSQKMKQIIKXTCETYKIHIVKVLKQVHPDIWIFIKAIGIMNNFINDIFEKLSQESSRLARY

SEQ ID NO: 31132 - protein, 113 aa, Glycine max
  unsure (1)..(113): unsure at all Xaa locations
  Clone ID: TF_LIB3051-117-Q1-K1-G3.pep
MAPKAEKKPAXRKPWEEKKSPVEDKVPAEKKPKAGKKLPKEGGAGGEGKTKKRNKKSVETYKIYIFKVLKQVHPDIGISSKAMGIMNSFINDIFEKLAQESSRLCRYNKKPTI

SEQ ID NO: 31133 - protein, 232 aa, Glycine max
  unsure (1)..(232): unsure at all Xaa locations
  Clone ID: TF_GmC45_6.pep
VCFINEKKPWKPRENTKMVMMKLKTGIHQENKMLCKHHNMHIYERKERRVKVKSHNEELTAKRRCSRSREREDRRSPSFSPREQKRTYQDGERKELSMHSLKDSSRTKNPDIDRNRVSTNGSSGHHHRHGVSTSGLGGYSPRKRKSEAAAKTPSPSKHSLEKKRAGWDLPPAGTNNPSAVVSSSFPVSNCAVLSNMHDVVSTSSLDLALVKPLPVSFPSDVSTGKNTXTLIL

SEQ ID NO: 31134 - protein, 111 aa, Glycine max
  unsure (1)..(111): unsure at all Xaa locations
  Clone ID: TF_LIB3242-241-Q1-J1-F9.pep
KAPKKHLATRSXHVKSAPTTGGVKKPHRYRSVTVALREIRKYQKSPELLIRKLPLQRLVREITQDFNTDLRLQIHPGLALLEAADAYLVGLFEDTHLCAIHAKRVTIMPND

SEQ ID NO: 31135 - protein, 127 aa, Glycine max
  unsure (1)..(127): unsure at all Xaa locations
  Clone ID: TF_12489081.pep
DAGGKIKKGAGGRKGGGPKKKPVSRSVKAGLQFPVGRIGRYLKKGRYAQRVCTGAPGYLGADIEYLSARVLXFAWNAARDNNKNKIIPKHVLLAVRYHDELRKXLAGVTIAPCGVLRNINPVVCLKR

SEQ ID NO: 31136 - protein, 75 aa, Glycine max
  Clone ID: TF_jC-gmX3049027C02sg12M8b1.pep
PFEMARSKQTARKSTGGKAPRKQLATKAGRKSAPTTGGVKNPHRYRSGTVALPVIRNYQKSTVPLIRKLPFQRLV

SEQ ID NO: 31137 - protein, 136 aa, Glycine max
  Clone ID: TF_19937397.pep
KPIDDNNSTVGDNAPAEKNPKGGKKLPKDGGARRQRNNKNRNPTIVKTYKIYIYNVLNHAHPDIGISSKDMGIMNSFINDIFEKLAQESSRLVRYNKKPTITSREIQTAVKLVLNGELSNHVDSDATNARYQLTSS

SEQ ID NO: 31138 - protein, 113 aa, Glycine max
  unsure (1)..(113): unsure at all Xaa locations
  Clone ID: TF_LIB3170-028-Q1-K1-H7.pep
MARTKQTARKSTGGKAPRKQLATKAARKSAPTTGGVKKPHRYRPGTVALREIRKYQKSTELLIRKAPLQRAVREXAXDLRLICVSEHAVLALQSCEHTLWLLRHTCVHHACTI

SEQ ID NO: 31139 - protein, 60 aa, Glycine max
  Clone ID: TF_LIB3242-723-P1-J1-D10.pep
QPYPLKKKKESEQQKHHPQQPIFIFIFTTTTLSTLTANPSCQLDILGHNGYPLSVNGTQV

SEQ ID NO: 31140 - protein, 140 aa, Glycine max
  Clone ID: TF_GmC1624_3.pep
MSSTGGSTKGGRGKPKASKSVSRSQKAGLQFPVGRIARFLKAGKYAERVGAGAPVYLSAVLEYLAAEVLELAGNAARDNKKNRIVPRHIQLAVRNDEELSKLLGSVTIANGGVLPNIHQTLLPKKAGKGKGEIGSASQEF

SEQ ID NO: 31141 - protein, 136 aa, Glycine max; identical to SEQ ID NO: 6802
  Clone ID: TF_GmC1660_4.pep

SEQ ID NO: 31142 - protein, 207 aa, Glycine max
  Clone ID: TF_GmC1341_1.pep
MVKHNNVIPNGHFRKHWQNYVKTWFNQPARKTRRRLARQKKAVKIFPRPTAGSLRPIVHGQTLKYNMKVRAGRGFSLEELKAAGIPKKLAPTIGISVDHRRKNRSLESLQANVQRLKTYKAKLVVFPRRAHKVKAGDSSLEELANATQVQGPFLPIVREKPTVDLVKVTDEMKAFKAYYKLRLERTNKRHHGARLKKAAEAEKEDKK

SEQ ID NO: 31143 - protein, 136 aa, Glycine max
  unsure (1)..(136): unsure at all Xaa locations
  Clone ID: TF_7692361.pep
MARTKQTARKSTGGKAPRKQLATKAARKSAPTTGGVKKPHRYRPGTVALREIRKYQKSTELLIQKLPFQKLIREITQDFKTNLHFQSHAILTLTKXTKAYLIKLFKNTNLFTIHAKHITIMPKNIQLTRRIRSKHT

SEQ ID NO: 31144 - protein, 127 aa, Glycine max
  Clone ID: TF_GmC732_6.pep
MAPAKAEKKPAEKKPAEKKISKEGGSEKKKKRTKKSVETYKIYIFKVLKQVHPDIGISSKAMGIMNSFINDIFEKLAQESSRLARYNKKPTITSREIQTAVRLVLPGELAKHAVSEGTKAVTKFTSS

SEQ ID NO: 31145 - protein, 66 aa, Glycine max
  Clone ID: TF_LIB3040-021-Q1-E1-C2-F1A.pep
NAARDNKKTRIMPSHIQLALRNDEGVSKLLGDVTIANGGVRPNNHNLLLPKKAGGSSKAAAADDDS

SEQ ID NO: 31146 - protein, 134 aa, Glycine max
  unsure (1)..(134): unsure at all Xaa locations
  Clone ID: TF_9900962.pep
RTKQTDRESTGGKARRKLLATKGALKSAPSTGGVNKPHRCRPGSGALRXIEIYQRSTGRWIRKLPLQRLVWEIAQDCKTDLNVHSHAVLRLHEACDAYLGGLLEDTNVWAMRAXRVSVMPIDMHVARWILGERA

SEQ ID NO: 31147 - protein, 134 aa, Glycine max
  Clone ID: TF_GmC120_1.pep
MAKAAEKKPAAEKAPAEKKPKAEKKVPKEGSGGEKKKKRSKKSVETYKIYIFKVLKQVHPDIGISSKAMGIMNSFINDIFEKLAQEAARLARYNKKPTITSREIQTAVRLVLPGELAKHAVSEGTKAVTKFTSS

SEQ ID NO: 31148 - protein, 134 aa, Glycine max; identical to SEQ ID NO: 31147
  Clone ID: TF_jC-gmXLIB3563P040dh07a2.pep

SEQ ID NO: 31149 - protein, 149 aa, Glycine max
  unsure (1)..(149): unsure at all Xaa locations
  Clone ID: TF_GmC45_4.pep
MDTGGKIKKGAGXRKGGGPKKKPVSRSVKAGLQFPVGRIGRYLKKGRYAQRVGTGAPVYLAAVLEYLAAEVLELAGNAARDNKKNRIIPRHVLLAVRNDEELGKLLAGVTIAHGGVLPNINPVLLPKKTERASKEPKSPSKATKSPKKS

SEQ ID NO: 31150 - protein, 83 aa, Glycine max
  unsure (1)..(83): unsure at all Xaa locations
  Clone ID: TF_LIB3108-040-QI-K1-C8.pep
KKPAEKKPAEEKKSTVVDKAPSEKKPMAGKKLAKEVGXADXGKKKKRNKKSVETYKIYIFKGLKHVHPDIGISSKAMGIMNSF

SEQ ID NO: 31151 - protein, 92 aa, Glycine max
  unsure (1)..(92): unsure at all Xaa locations
  Clone ID: TF_701064730H1.pep
FRYCFRMQIQIARTIQTARKSTGGKASRNEVATKAARKSDPTTGGVKKPHRXRSGTVDLREIMKFQKSTELLIRKLPFQRLVREIAQDFKTD

SEQ ID NO: 31152 - protein, 98 aa, Glycine max
  Clone ID: TF_15201339.pep
MIKKRTNKSVETYLIYIFKVLEEDHPDIGISMDAMGIMNSFLNDIFHKLVHKASRLARYYKISTIASMDILTAVPLLLPGDVSQHALSEGTKADTDIT

SEQ ID NO: 31153 - protein, 98 aa, Glycine max
  unsure (1)..(98): unsure at all Xaa locations
  Clone ID: TF_9902832.pep
APAKAEKKPAEKKPSAEKAPAEKKPNAEKKISNEGGSEKNKKRTKKSVETYKIYIFKVLKQVHPDIGISSKAMGIMNSFINDIFXKLAQQASRLASYY

SEQ ID NO: 31154 - protein, 123 aa, Glycine max
  Clone ID: TF_LIB3051-027-Q1-K1-D2.pep
MARTKQTARKSTGGKAPRKQLATKAARKSAPTTGGVKKPHRYRPGTVALREIRKYQKSTELLIRKLPFQRLVREIAQDFKTDLRFQSHAVLALQEAAEAYLVGLFEDTNLCAIHAKRVTIMPK

SEQ ID NO: 31155 - protein, 147 aa, Glycine max
  unsure (1)..(147): unsure at all Xaa locations
  Clone ID: TF_22541444.pep
APKAEKNPADKKPAEEKKSTVGDNAPAXKKPKAXKKLPNDGCAGGXWKKKKKNKKSVETYKIYIFKVLXXVNPDIDISSKAMGIINSFINDIFEKLSPKSSILAHYNNKPTITSKKIQTTIMLMLPNKLTXHTISKGTKAITKFTXS

SEQ ID NO: 31156 - protein, 144 aa, Glycine max
  Clone ID: TF_GmC110_3.pep
MSSTEAAATEKKGGRGKPKTSKSVSRSSKAGLQFPVGRVARYLKAGRYAQRVGSGSPVYLSAVLEYLAAEVLELAGNAARDNKKTRIVPRHIQLAVRNDEELSKLMGSVTIANGGVLPNIHQNLLPKKVAGKGKTEIGSASQEF

SEQ ID NO: 31157 - protein, 98 aa, Glycine max
  Clone ID: TF_LIB3242-090-Q1-J1-H4.pep
KNQESASAFWKQRPKYFGGALTKERGGKTTGGKAPRKQLATKAARKSAPTTGGEKKPQTNRPGTDALRETRKHQKSTELLNRRLTCQREARETAQKYK

SEQ ID NO: 31158 - protein, 103 aa, Glycine max
  unsure (1)..(103): unsure at all Xaa locations
  Clone ID: TF_LIB3108-025-Q1-K1-A5.pep
IITEYYPHGSRGPVVALRLAPRHAVLLPDLITHVDEYAPPVINPKAANKISNEGGSENNKKRTKKSVETYNIYIFXVLKHVHPDICVFSLAVVFINSFINDIF

SEQ ID NO: 31159 - protein, 136 aa, Glycine max; identical to SEQ ID NO: 6802
  Clone ID: TF_GmC1660_1.pep

SEQ ID NO: 31160 - protein, 136 aa, Glycine max; identical to SEQ ID NO: 6802
  Clone ID: TF_GmC1660_2.pep

SEQ ID NO: 31161 - protein, 136 aa, Glycine max; identical to SEQ ID NO: 6802
  Clone ID: TF_GmC40_13.pep

SEQ ID NO: 31162 - protein, 136 aa, Glycine max; identical to SEQ ID NO: 6802
  Clone ID: TF_GmC40_20.pep

SEQ ID NO: 31163 - protein, 136 aa, Glycine max; identical to SEQ ID NO: 6802
  Clone ID: TF_GmC40_23.pep

SEQ ID NO: 31164 - protein, 136 aa, Glycine max; identical to SEQ ID NO: 6802
  Clone ID: TF_GmC40_26.pep

SEQ ID NO: 31165 - protein, 136 aa, Glycine max; identical to SEQ ID NO: 6802
  Clone ID: TF_uC-gmrominsoy113e12b1.pep

SEQ ID NO: 31166 - protein, 121 aa, Glycine max
  unsure (1)..(121): unsure at all Xaa locations
  Clone ID: TF_LIB4391-050-R1-K1-H12.pep
RYLEDQLARTKHIALPTAGGRAAMKQLATKAARKLAPSTGGETKPHRYHSGTDAPREIRNYQRSTXLLMRKLPFQRLDREXAQDLKTDLRVQSHAALALQEGAGAXVAGQFEDSILSAIHA

SEQ ID NO: 31167 - protein, 107 aa, Glycine max
  unsure (1)..(107): unsure at all Xaa locations
  Clone ID: TF_7146544.pep
DSGGKIKKGAGGRKGGGPKKKPVSKSVHAGLQFPVXRIGRYLKKRRYSQRVGTGAPVYWAAILEYLAAEVLEXAGNAARDNEENRIISRHVLLAVRNYEELGNCLLG

SEQ ID NO: 31168 - protein, 139 aa, Glycine max
  Clone ID: TF_GmC128_1.pep
MASRGKTQGSGTTKKGISRSNKAGLQFPVGRIARYLKIGKYADRIGSGAPVYLASVLEYLAAEVLELAGNAAMDNKKTRIMPRHIQLAVRNDEELSRLLGDVTIASGGVTPNIHNMLLPKKVGTSTSTFMGPSADDDDA

SEQ ID NO: 31169 - protein, 101 aa, Glycine max
  Clone ID: TF_GmC156942_1.pep
MAPKTADTKQTASKAPAKAPASKAPAKAPAKKPASGDKKKSKKRVESYTSYIFKVLKQVHPDTGVSNKAMSIMNSFVNDIFERVADEASRLAAYNKRSTIS

SEQ ID NO: 31170 - protein, 99 aa, Glycine max
  Clone ID: TF_GmC732_13.pep
MAPAKAEKKPAEKKPAAEKAPAEKKPKAEKKISKEGGSEKKKKRTKKSVETYKIYIFKVLKQVHPDIGISSKAMGIMNRVILVLFGELAQHAVRLARYP

SEQ ID NO: 31171 - protein, 140 aa, Glycine max; identical to SEQ ID NO: 31140
  Clone ID: TF_GmC1624_1.pep

SEQ ID NO: 31172 - protein, 140 aa, Glycine max
  Clone ID: TF_GmC1624_2.pep
MSSTGGSTKGGRGKPKASKSVSRSQKAGLQFPVGRIARFLKAGKYAERVGAGAPVYLSAVLEYLAAEVLELAGNAARDNKKNRIVPRHIQLAVRNDEELSKLLGSVTIANGGVLPNIHQTLLPKKVGKGKGEIGSASQEF

SEQ ID NO: 31173 - protein, 152 aa, Glycine max
  unsure (1)..(152): unsure at all Xaa locations
  Clone ID: TF_LIB5068-020-A1-XP1-B7.pep
PATQQSAKHPPPRPAPPEAPRKPQTARTKQTARKPTGGKAPRKQPATKAARKPAPATGGAKKPHRPRPGTAAPRETRNHQKSTERPTRKPPTQXKDRETAQDPKTDQRPQSSAETAPQEAAEAHPGGHPEDTNPSATHANTGTKRPKDQQPA

SEQ ID NO: 31174 - protein, 152 aa, Glycine max
  unsure (1)..(152): unsure at all Xaa locations
  Clone ID: TF_LIB4202-010-Q1-K2-B3.pep
PGGKGPXKQLATKGARKSAPTTGGVKKPHRYRPGTVALRGRGGGXXSTQLXIRKLPFQRGGREIAQDFKTELRFQSHAVLALQEAAEAYLVGLFEXTNLCAIHAKRVTIMPKDIQLGRRSPGERAVGGWKDEDWGLRVVFLVFRFLFLFNRW

SEQ ID NO: 31175 - protein, 136 aa, Glycine max; identical to SEQ ID NO: 6802
  Clone ID: TF_GmC1660_3.pep

SEQ ID NO: 31176 - protein, 49 aa, Glycine max
  Clone ID: TF_uC-gmflLIB3260P099c12b1.pep
PTRSFTRPAAEAYLVGLFEDTNLCAIHAKRVTIMPKDIQLARRIRGERA

SEQ ID NO: 31177 - protein, 136 aa, Glycine max
  Clone ID: TF_GmC745551_1.pep
MARTKQTARKSTGGKAPRKQLATKAARKSAPTTGGVKKPHRYRPGTVALREIRKYQKSTELLIRKLPFQRLVREIAPDFKTDLRFQSHAVLALQEAAEAYLVGLFEGTIWCAIHAERVTVMPKDMQLARRIRCEQA

SEQ ID NO: 31178 - protein, 122 aa, Glycine max
  unsure (1)..(122): unsure at all Xaa locations
  Clone ID: TF_LIB4165-005-Q1-K1-G1.pep
MGADGESKKGARGREGGGPXKKPGSRGVKAGLQFPVXRDWRDLRRRGGAQRVXAGAPVYLAAGLEYLAAEVLXCGGNAARDNKKNRSIPRDVLXGXRSYEEXXKLVXWVTIAHGGVLPNINP

SEQ ID NO: 31179 - protein, 83 aa, Glycine max
  unsure (1)..(83): unsure at all Xaa locations
  Clone ID: TF_700754394H1.pep
HSWKKKKKLFKLALTKQTGRNSTGGKAPRKLFATRVALKSAPXTGGVKKPNRYRPGTVALREFRKSQKVTELLIRKLPFQRLV

SEQ ID NO: 31180 - protein, 129 aa, Glycine max
  unsure (1)..(129): unsure at all Xaa locations
  Clone ID: TF_LIB4204-012-R1-N1-H3.pep
KKLPKKVGAGGEGKKKXRHTKCVYSSLLCMFKVLKQFHPGIGISSKALGIMSSFSLAMFVKLVQESSRIARSIKGPFIPWRGIQSPVRFVMPGFLTEPTVSQGSKAVAKVISSCISYFIAFLSLFFVTH

SEQ ID NO: 31181 - protein, 158 aa, Glycine max
  Clone ID: TF_GmC394_1.pep
MARVKHTPASRKSAKKQAPRASTSTQPPPQSQSPATRERRRAQQVEPQQEPEAQGRKKRRNRSGTVALREIRHFQRSCELLIPAAPFIRCVKQITNQFSTEVSRWTPEAVVALQEAAEEYLVHLFEDGMLCAIHARRITLMKKDIELARRLGGIGRPW

SEQ ID NO: 31182 - protein, 91 aa, Glycine max
  unsure (1)..(91): unsure at all Xaa locations
  Clone ID: TF_uC-gmroLIB3259P159d11a1.pep
VALREIXRKYQKSTELLIRKLPFQRLVREIAQDFKTDLRFQSHAVLALQEAAEAYLVGLFEDTNLCAIHAKRVTIMPKDIQLARRIRGERA

SEQ ID NO: 31183 - protein, 136 aa, Glycine max
  unsure (1)..(136): unsure at all Xaa locations
  Clone ID: TF_LIB4392-018-R1-K1-D6.pep
MARTKQTARKSTGGKAPRKQLATKAARKSAPTTGGVKKPHRYRPGTVALREIRKYQKSTELLIRKLPFQRLVREIAQDFKTDLRFQSHAVLALQEAAEAYLVGLFEDTNLWAIHAQRVTIMPKDIXLARRIPGERA

SEQ ID NO: 31184 - protein, 78 aa, Glycine max
  unsure (1)..(78): unsure at all Xaa locations
  Clone ID: TF_700567927H1.pep
SEARTKQTAXKXSTGGKAXRKQLXXKAARKXAXTTGGVKXPHRYRPGTVALREIRKYQKSTELLIRKHPFQRLVRELL

SEQ ID NO: 31185 - protein, 48 aa, Glycine max
  unsure (1)..(48): unsure at all Xaa locations
  Clone ID: TF_LIB3040-041-Q1-E1-E10.R5.pep
LPCLHSXAAXAYLVGLFEDTNLCAIHAKRVTIMPKDIQLARRIRGERA

SEQ ID NO: 31186 - protein, 99 aa, Glycine max
  Clone ID: TF_jC-gmro02910067f08d1.pep
KPHPFRPGRGVLREILKAQKSPELLIRKLPFQRLVKEIAQDFKTDFRFQKNPVLAFQETPEAFLVGLFEDPNLCAIPVKRVSLMPKGIQLARKIKGEKA

SEQ ID NO: 31187 - protein, 56 aa, Glycine max
  Clone ID: TF_LIB3049-044-Q1-E1-D7.pep
TDLRFHSHSVLALQEAADAYLVGLFEDTNLCAIHATRVTIMPKDIQLARRIRGERA

SEQ ID NO: 31188 - protein, 63 aa, Glycine max
  Clone ID: TF_LIB4204-008-R1-N1-H5.pep
MTSFINRIFEKLGQEFFRLARYNKKPPLLLREIQPPVRLVLPGELAKPPVFEGPKGVPKFLSF

SEQ ID NO: 31189 - protein, 127 aa, Glycine max
  unsure (1)..(127): unsure at all Xaa locations
  Clone ID: TF_jC-gmst024120e12a1.pep
RKAPRKQLATKAARXSAPTTGGVKKPHRYRPGTVALREIRKYQKSTELLIRKLPFQRLVREIAQDFKTDLCFQSHAVLALQEAAEAYLVGLFEDTNLCAIHAKRVTIMPXDIQLAXRIRGERARGGG

SEQ ID NO: 31190 - protein, 136 aa, Glycine max
  Clone ID: TF_GmC92043_2.pep
MARTKQTARKSTGGKAPRKQLASKAARKSAPSTGGVKKPHRYKPGTVALREIRRYQKSTELLIRKLPFQRLVREIAQDFKSDLRFQSSAIGALQESVEAYLVSLFEDTNLCAIHAKRVTIQSKDIQLARRLRGERG

SEQ ID NO: 31191 - protein, 89 aa, Glycine max
  unsure (1)..(89): unsure at all Xaa locations
  Clone ID: TF_700787362H2.pep
RATFSASYHTVXMDRTKQTARKSSGGNAPRKQLATKAARKSAPATGGVKKPHRFRPGTXALREIRKYQKSTELLIRKLPFQRLVREIAQ

SEQ ID NO: 31192 - protein, 74 aa, Glycine max
  Clone ID: TF_jC-gmfl02220084b08a1.pep
LLRYTKIVVTYKIYIFKVLKQVHPDIGISCKAMGIMNSFINDIFDMLAQVSSRLARYNKKPTITSREIQTAVRL

SEQ ID NO: 31193 - protein, 119 aa, Glycine max
  unsure (1)..(119): unsure at all Xaa locations
  Clone ID: TF_9900407.pep
AGRRNVGRPKKKPVSTSVKASLHFPIRPIGRSFKKGRYAHRVGTGAPVYLTKLLQYLSAKVLKFSENAARDNKKNMIIPIHVLLAVKNDNDLXKLLTDVTITHNNILADINPIVLPKKT

SEQ ID NO: 31194 - protein, 136 aa, Glycine max
  Clone ID: TF_GmC92043_1.pep
MARTKQTARKSTGGKAPRKQLASKAARKSAPSTGGVKKPHRYKPGTVALREIRRYQKSTELLIRKLPFQRLVREIAQDFKSDLRFQSSAIGTLQESVESYLVSLFEDTNLCAIHAKRVTIQSKDIQLARRLRGERN

SEQ ID NO: 31195 - protein, 117 aa, Glycine max
  Clone ID: TF_LIB3051-063-Q1-K1-F7.pep
MKFQRLPGPVGQGYRLELEKKKKLFEMARTKQTARKSTGGKAPRKQLATKAARKSAPTTGGVKKPHRYRPGTVALREIRKYQKSTELLIRKLPFQRLVREIAQDFKTDLRFQSHAVL

SEQ ID NO: 31196 - protein, 140 aa, Glycine max
  unsure (1)..(140): unsure at all Xaa locations
  Clone ID: TF_16278806.pep
MAPKAEKKPAEKKPAEEKKSTVGDKAPAEKKPKAXKKLPKEXGAGGEGKKXKENKKSVETYKIYIFKGLKQXHPDIGISSQAMGIMNSFINDIFXKLAPESSKLARYNKKPTITSRGIQTAVRLVLPGELANHARFEGPK

SEQ ID NO: 31197 - protein, 134 aa, Glycine max
  Clone ID: TF_7925666.pep
RTKQTAHKSTRGKAPKKQLATKAAHKSTPTTGDIKKPHHYRPSTITLHKIIKYQKTTELLIQKLPFHKAIHKITQDFNTNLHFHSHTILTLQKPTKSYLIKLFRNTNLYAIHTKHITIIPKYIQLSIKIHNKRS

SEQ ID NO: 31198 - protein, 134 aa, Glycine max
  unsure (1)..(134): unsure at all Xaa locations
  Clone ID: TF_8669694.pep
RTKQTARKSTGGKAPRKQLATKAARKSAPTTGGVKKPHRYRPGTGALREIRKYQKSTXLLIRKLPFHRLVREIAQDFKTDLRLQSHAVLALQDAAGAYLVGLFEDTNLCAIHAKLVTIMPIDIQLARRIRGERA

SEQ ID NO: 31199 - protein, 90 aa, Glycine max
  unsure (1)..(90): unsure at all Xaa locations
  Clone ID: TF_6070218.pep
GVNKPHRFRPGTMALKEIKKYQKSTELLIRKLPFQYLAREIAXDFKTDLMLQSSSVAALQEAADADLVGLCEDTNLCDIIPXRVTVMPTD

SEQ ID NO: 31200 - protein, 62 aa, Glycine max
  Clone ID: TF_LIB3108-022-Q1-K1-E11.pep
VPRHVCLAVRNDEELGRLLGGVTIAHGGVLPSINPVLLPKKTGKEGVEPKSPKKAAKSPKKA

SEQ ID NO: 31201 - protein, 136 aa, Glycine max
  Clone ID: TF_LIB5118-014-A2-PF1-F6.pep
MARTKQTARKSTGGKAARKQLATKAARKSAPTTGGVKKPHRYRPGTVALREIRKYQKSTELLIRKLPFQRLVREIAQDFKTDLRFQSHAVLALQEAAEAYLVGLFEDTNLCAIHAKRVTIMPKDIQLARRIRGERA

SEQ ID NO: 31202 - protein, 113 aa, Glycine max
  unsure (1)..(113): unsure at all Xaa locations
  Clone ID: TF_LIB4392-013-R1-K1-G4.pep
MARTKQTARKSTGGKAPRKQLATKSAPTTGGVKKPHRYRPGTVALREIRKYQKSTELLIRKLPFQRLVREIAQDFKTDLRFQSHAVLALQEAAEAYLXVGLFEDTNLCAIHAK

SEQ ID NO: 31203 - protein, 80 aa, Glycine max
  unsure (1)..(80): unsure at all Xaa locations
  Clone ID: TF_8827097.pep
EKKPAEKKPEADNAPAEKTTAXKNIPKDATSGEKKKKMTKNSMETYKIYIFKVAQQFTLRLYLHKARVIMQSLMNEIFEK

SEQ ID NO: 31204 - protein, 143 aa, Glycine max
  unsure (1)..(143): unsure at all Xaa locations
  Clone ID: TF_jC-gmfl02220084h12a1.pep
MARTKQTARKSTGGXAPTKQLATKAARKTGPTTGGVTKPDRYRAGTVALRESRIYQKSTELMIRTLPLQKLVRERAQDSTTELRVQSHTVLALQEAAEAYLEELCEDTSPRAIDAKHVTIMPNDIQLTGKIRGERARDGSWKD

SEQ ID NO: 31205 - protein, 61 aa, Glycine max
  Clone ID: TF_LIB4164-029-Q1-N1-C3.pep
NKKPRIVPPHTQLAVRNPEKLTQLLGDVPTANGGVMPNIPNLLLPKKAGGPPKGAAPADPP

SEQ ID NO: 31206 - protein, 134 aa, Glycine max
  Clone ID: TF_15001070.pep
MARTKQTARKSTGGKAPRKQLATKAARKSAPTTGGVKKPHRYRPGTVALREIRKYQKSTELLIRKLPFQRLVREIAQDFKTDLRFQSHAVLALQEAAEAYLVGLFEDTNLCAIHAQRVTIMPQDISLARKIPGE

SEQ ID NO: 31207 - protein, 144 aa, Glycine max
  unsure (1)..(144): unsure at all Xaa locations
  Clone ID: TF_jC-gmXLIB3563P041dc06d1.pep
DPASDHFSNRLQGGTAGDRTNTCDSVYYLTIHTQNLGARNRTSGRTIKKGAGGRKGGGPNKRPVKTFGGAGSNXPVGRIGQDWKKGRYAQGLRTAAPVYLAAYLEYLSAEVLESAVTAARARXKNKTISRHVLTTKRNDNELRK

SEQ ID NO: 31208 - protein, 149 aa, Glycine max
  unsure (1)..(149): unsure at all Xaa locations
  Clone ID: TF_GmC128_2.pep
MASRGKTQGSGTTKKGISRSNKAGLQFPVGRIARYLKIGKYADRIGSGAPVYLASVLEYLAAEAIFLNRLXIFVLELAGNAAMDNKKTRIMPRHIQLAVRNDEELSRLLGDVTIASGGVTPNIHNMLLPKKVGTSTSTFMGPSADDDDA

SEQ ID NO: 31209 - protein, 53 aa, Glycine max
  Clone ID: TF_LIB3170-016-Q1-K1-C5.pep
GRIVPRHIQLAVWSDQEFSQLIGSFTISHGGVLANIHQNLLPKKVACQGETQI

SEQ ID NO: 31210 - protein, 100 aa, Glycine max
  Clone ID: TF_LIB3139-043-P1-N1-D5.pep
MARTKQTARKSTGGKAPRKQLATKAARKSAPTTGGVKKPHRYRPGTAALREIRKYQKSTELLILKLPFQRLVREIAQDFKTDLAFQSHAVLALQEAAEAY

SEQ ID NO: 31211 - protein, 83 aa, Glycine max
  unsure (1)..(83): unsure at all Xaa locations
  Clone ID: TF_LIB3073-002-Q1-K1-G3.pep
MAPAEADKKPPEKKPAAEKAPTDKNPKAXKKISDEGRREKKKTRTKKSVETYKIYIVKVLTQVHPDIGITSKDMGIMNSFIID

SEQ ID NO: 31212 - protein, 110 aa, Glycine max
  unsure (1)..(110): unsure at all Xaa locations
  Clone ID: TF_LIB3049-047-Q1-E1-D10.pep
MARTKQTARKSTRRKAPKKQLATKAARKSAPTTGGVKKPQRYRPGTVALRGIRKYQKSTELLIRKLPFQKLVREIAQDFKTDLRFPEHAVLALQEAAEAYLVGLFXDTNL

SEQ ID NO: 31213 - protein, 143 aa, Glycine max
  unsure (1)..(143): unsure at all Xaa locations
  Clone ID: TF_LIB3138-084-P1-N1-C6.pep
PRIPPQVSIQNSLFPFWNQNRKCFYLARPNQPARKQTGGKAPRKQLATKAARKSAPTTGGVKKPHRFRPGTVALREIRKYQKSTELLIRKLPFQRLVRDIAHDFKTDLRFQSHAVLALQEAAEAYLVGLFEDTNXCAIHAKRV

SEQ ID NO: 31214 - protein, 64 aa, Glycine max
  unsure (1)..(64): unsure at all Xaa locations
  Clone ID: TF_LIB4164-023-Q1-N1-A7.pep
EIAQDFKTILGFQXSHAVLALQEAAEAILVGLFEDTNLCAIHAKGVTIMPKDIQLARRIRGERA

SEQ ID NO: 31215 - protein, 105 aa, Glycine max
  unsure (1)..(105): unsure at all Xaa locations
  Clone ID: TF_4405547.pep
KQTXXKXTGGKAXRKQLATKAAXKXAPTTGXXKKPHXXXPXTXALXEIRKYQKSTELLIRKXPFQRLGRRKCSRTSRLILRFPEPTPPCHLQESLLRPYPWLGLF

SEQ ID NO: 31216 - protein, 105 aa, Glycine max
  unsure (1)..(105): unsure at all Xaa locations
  Clone ID: TF_LIB5068-030-A1-XP1-F6.pep
GSGENNPHRYRPGTVALREITKYQKSTELLFRKLPFQRLVREIGQHFKTDLRFQSHDVLALQEAAEAYLVWALXEDTILCAIHAKRVTIMPNDIHLGRRIRGERA

SEQ ID NO: 31217 - protein, 72 aa, Glycine max
  Clone ID: TF_LIB4390-022-R1-N1-A8.pep
VLELAGNPPKNNKKTRIVPPPPQLAVRNPQKFSQLLGDVPLANGGVMPNIPNLFFSKKGGGSSKGAAAAHDF

SEQ ID NO: 31218 - protein, 55 aa, Glycine max
  Clone ID: TF_LIB3242-404-P1-J1-C11.pep
MQGEPRKHLTTKAAKKSAPTTDLMKKPHDFHPSTMALMKIRKYQKNTELLIQKLP

SEQ ID NO: 31219 - protein, 99 aa, Glycine max
  unsure (1)..(99): unsure at all Xaa locations
  Clone ID: TF_LIB3167-079-P1-K1-H5.pep
MFGKRVGTNQTARRXTGGKAPRKQLATKAVGRSVPATGGVKKPPRFRPGTGALSRIRKSQKSPGLLIRKLPFQRWFQGIAQDLRTDLRFKSSSVFRFKE

SEQ ID NO: 31220 - protein, 118 aa, Glycine max
  unsure (1)..(118): unsure at all Xaa locations
  Clone ID: TF_10234512.pep
ADMKPVADNTISMDGRSYMISMRTEKSVPTYKIYIFNVXNQVLPYMSIFGQAMVIMISFVSNIFKKLAQESSRLARYHMKLSITSMEIHAAARLVLPGXLAMHAASGGALVVAIFSIS

SEQ ID NO: 31221 - protein, 107 aa, Glycine max
  Clone ID: TF_jC-gmX3039042H07sg7A3b1.pep
MARTKQAAGQITGGKAARKQFATKAARKYAPTTVGVKKSHRYRPGTVALREIRKYHKSTELLIRKLTFQRLVREIDQYCKTDLRYQRHAVLALQEACDAYLDGLFED

SEQ ID NO: 31222 - protein, 85 aa, Glycine max
  Clone ID: TF_LIB3242-723-P1-J1-H12.pep
IRKYQKSTELLIRKLPFQRLVREIAQDFKTDLRFQSSAVSALQKAAEAYLVGLFEDTNLCAIHAKRVTIMPKDIQLARRIRGERA

SEQ ID NO: 31223 - protein, 134 aa, Glycine max
  unsure (1)..(134): unsure at all Xaa locations
  Clone ID: TF_LIB4204-007-R1-K1-D5.pep
MARTKQTARKSTGGKAPRKQLATKAARKSAPATGGVKKPHRFRPGTVALREIRKYQKSTELLIRKLPFQRLVREIAQDFKTDLRFQSSAVSALQEAAEAYLVGLFEDTNLCAIHAKRVTIMPKDIQLARXIRGE

SEQ ID NO: 31224 - protein, 132 aa, Glycine max
  unsure (1)..(132): unsure at all Xaa locations
  Clone ID: TF_LIB4164-052-R1-N1-C9.pep
PKAGKKLPKKGGPAGKGKKKKRTPKGGGPTKISFFKVFKRVPPPFGFSSKALGFLNSFFNDFFXKVAPDFFKFARSTKKPPLPSREFXPPVRLFLPGDLAKPPVFWGAKAVPKFPSFLTDFFAPSLRFRGFF

SEQ ID NO: 31225 - protein, 96 aa, Glycine max
  Clone ID: TF_18731884.pep
DRTKQTACMHIGGKAPRKQLATKAARQLVFFFGGVKKPHRYRPVSLALREICMCHNSRERLLHKLPCLRLVREIARDCMTDLRCKTSAVSALLEAA

SEQ ID NO: 31226 - protein, 133 aa, Glycine max
  unsure (1)..(133): unsure at all Xaa locations
  Clone ID: TF_6667439.pep
RTKQTARKSTRGKAPKKQLATKAARKSAPTTGGVKKPHQYHAGTIALRKIEKYQKSTXLVMQKLPLQKLGSXMTEDFKTDLHVQSRXMLALRKAAEAYVGKLCRDTNLGTMHAKRIAIRRKDIRLARKIGGKR

SEQ ID NO: 31227 - protein, 135 aa, Glycine max
  unsure (1)..(135): unsure at all Xaa locations
  Clone ID: TF_LIB5118-005-B1-PF1-B11.pep
MARTKQTARKSTGGKAPRKQLATKAARKSAPTTGGVKKPHRYRPGTVALREIRKYQKSTELLIRKLPFQRLVREIAQDFKTDLRFQSHAXLFADXPEXYLVGLFEDTNLCAIHAKRVTIMPKDIQLARRIRGERA

SEQ ID NO: 31228 - protein, 94 aa, Glycine max
  Clone ID: TF_LIB5068-015-A1-XP1-H12.pep
MARTKQTARKSTGGKAPRKQLATKAARKSAPTTGGVKKPHRYRPGTVALREIMKYHKSTELLIRKLPFQKLVREIAQDFQTDLRFHSHALLVFP

SEQ ID NO: 31229 - protein, 109 aa, Glycine max
  unsure (1)..(109): unsure at all Xaa locations
  Clone ID: TF_LIB3049-053-Q1-E1-A8.pep
NLCIPLTQDSASAFWKQRPKHFEMARTKQTARKSTGGQAPRKQLATSAARKSAPTTGGVKNPHRHRPGAVALREIMTYQKSXEHLIRTHPFQTLVRESAQDVTTDMRFQ

SEQ ID NO: 31230 - protein, 47 aa, Glycine max
  Clone ID: TF_uC-gmroLIB3258056g05a1.pep
FQALQETAEAYLVGLFENTNLCAIDAKRVTIMPKNIQLARRIRGKRA

SEQ ID NO: 31231 - protein, 128 aa, Glycine max
  Clone ID: TF_GmC80_1.pep
MSGKGAKGLITAKDKDKKKPISRSSRAGLQFPVGRIHRLLKSRVTAHGRVGATAAVYSAAILEYLTAEVLELAGNASKDLKVKRITPRHLQLAIRGDEELDTLIKGTIAGGGVIPHIHKSLINKSSKE

SEQ ID NO: 31232 - protein, 138 aa, Glycine max
  Clone ID: TF_GmC732_2.pep
MAPAKAEKKPAEKKPAEKAPAEKKPKAEKKISKEGGSEKKKKRTKKSVETYKIYIFKVLKQVHPDIGISSKAMGIMNSFINDIFEKLAQESSRLARYNKKPTITSREIQTAVRLVLPGELAKHAVSEGTKAVTKFTSS

SEQ ID NO: 31233 - protein, 138 aa, Glycine max
  Clone ID: TF_GmC732_3.pep
MAPPKAEKKPAEKKPAEKAPAEKKPKAEKKISKEGGSEKKKKRTKKSVETYKIYIFKVLKQVHPDIGISSKAMGIMNSFINDIFEKLAQESSRLARYNKKPTITSREIQTAVRLVLPGELAKHAVSEGTKAVTKFTSS

SEQ ID NO: 31234 - protein, 144 aa, Glycine max; identical to SEQ ID NO: 31156
  Clone ID: TF_GmC110_1.pep

SEQ ID NO: 31235 - protein, 133 aa, Glycine max
  Clone ID: TF_GmC16229_1.pep
MAKAAEKKPAAEKSPAEKKPKAEKKIPKEGGGEKKKKRSKKSVETYKIYIFKVLKQVHPDIGISSKAMGIMNSFINDIFEKLAQEAARLARYNKKPTITSREIQTAVRLVLPGELAKHAVSEGTKAVTKFTSS

SEQ ID NO: 31236 - protein, 133 aa, Glycine max
  Clone ID: TF_9259414.pep
KSNVTEEEKAREVVHVRARRGQATDSHSLAERVRRGKINEKLRCLQNIVPGCYKTMGMAVMLDEIINYVQSLQHQVEFLSLKLTAASTFYDFNSETDALETMQRARASEAKELGKYKKEGYGGVSFFQPAWPL

SEQ ID NO: 31237 - protein, 269 aa, Glycine max
  unsure (1)..(269): unsure at all Xaa locations
  Clone ID: TF_GmC700886_1.pep
RDLPDSSQKDNDLGASRKVLNFPHFSTPRNNVSSAPGSTQFREKTTANLSQSEAREYSVITVGSSHCGSSHIPQEKDVSRVSSSAVWATNNNNSLSAEPEAVRDCVQRPICPRSDKGKSEMIEPTVTSSSGGSGSTGIGRTCSLSTRDHGQKRKGTEEEASEEQSEATELKSADGNKASQRTGSSKRNRAAEVHNQSERRRRDRINEKMRTLQQLIPNSDKTDEASMLEEXIEYLKSLQFQLQVMVXGVCMTPVMFPGIQHYMSQMGMG

SEQ ID NO: 31238 - protein, 236 aa, Glycine max
  Clone ID: TF_GmC1214_2.pep
MVSRENTNWLFDYGLIDDIPVPDATFGVNSSAFTWPPNALNASSNVGVEIDGSLGDSDSLKESGSKKRVRSESCAASGSKACREKLRRDRLNDKFVELGAILEPGRPAKTDKAAILIDAVRMVTQLRGEAQKLKDTNQGLQEKIKELKAEKNELRDEKQRLKAEKEKLEQQLKSLNAQPSFMPPPAAIPAAFAAQGQAHGNKLVPFISYPGVAMWQFMPPAAVDTSQDHVLRPPVA

SEQ ID NO: 31239 - protein, 181 aa, Glycine max
  Clone ID: TF_GmC1444_1.pep
MENNPSSSRVDRKFIERNRRNQMKALFRKLNSLVPHQRSKEAIPLPDQLEEATNYIKKLQINLEKMKDKKNMLLGNERPNERMNNDGRRVGLKSPRIEIQQMGSALEVVLITGLDSQFMFGETIRVLHEEGVDVVNASYKVIEDAVFHSIHCQDKEETANGAARISERLKNFIHDSSYNAF

SEQ ID NO: 31240 - protein, 246 aa, Glycine max
  Clone ID: TF_GmC1305_1.pep
MLPLFRGNELVMQFSNRPQRQQHKISEDLILDDYASLNVNDSNQKFITSSSSQPTKKLFYGANKKNHDSPEQAKKMIHKEIERQRRQEMATFYASLRSLLPLEFIKGKRSISDHMNEAVNYIKHMQKHIKELGAKRDELKKLSNHSNNMENNHEGLHTSCNFTVHEKNGIIGIEITSVFREEKPKISKLLQFLTEEGLEVVSFFSTEVNGRLLHSVQCEVNHSNSVDPSELRKKVSKAFSTFRCSD

SEQ ID NO: 31241 - protein, 196 aa, Glycine max
  Clone ID: TF_GmC5053_2.pep
NQLTVLVSVPVIRITRIWKLNQRFYALRAVVPNVSKMDKASLLGDAILYINELKSKLNVLDSEKTELEKQLDSTKKELELATKNPPPPPPPPPPPGPPPSNSVEPKKTTSKLADLELEVKIIGWDAMVRIQCSKKNHPAARLMAALKDLDLEVHHASVSVVNDLMIQQATVNMGNKFYTQEQLLSALSSKVGDELR

SEQ ID NO: 31242 - protein, 222 aa, Glycine max
  unsure (1)..(222): unsure at all Xaa locations
  Clone ID: TF_GmC234074_1.pep
MEFYDQDFLEELMTLRRETWDTNPRTEENQFFDGGSFDCFDQNSLPYLPNSSCGQEVPQTYNNDYPFSEIYGSLLDESSPQIMDSFYSTLDTPLNTPPFLGQEDYPILSMMEEEEQGLLGEELKNLELQTTCKMEPTQSSEMPVFNMGTGLERKNRSKKLQGQPSKNLMAERRRRKRLNDRLSMLRAIVPKISKMDRTSILGDTIDYMKELLXKINNLQACK

SEQ ID NO: 31243 - protein, 215 aa, Glycine max
  unsure (1)..(215): unsure at all Xaa locations
  Clone ID: TF_GmC1214_4.pep
MVSPENSNWLFDYPLIDDVIPVGDASFSVSASAFSWPPPPANVSVEIDASLGDSDGPKDTALKKRARCDSSTASSSKACREKLRRDRLNDKFVELGSILEPGRPPKTDKAAILIDAARMVTQLRDEALKLKDSNTSLQEKIKELKAEKNELRDEKQRLKAEKEKLEMQVKSMNAQPAFLPPPPAIPAAFAPQGQAPGNKLMPFIRVPGVAMWXFM

SEQ ID NO: 31244 - protein, 111 aa, Glycine max
  Clone ID: TF_21888659.pep
MEMEDFLWGGGIDVDVTKRKSDGFEGSNGVIGSGWCGSSFSLVLDRERGELVEEPVRLEKKGVSTERSIEALKSHSEAERKRRARINAHLDTLRSVIPGAMKMDKASLLGE

SEQ ID NO: 31245 - protein, 282 aa, Glycine max
  Clone ID: TF_GmC253_1.pep
MDCSAARKTQKADREKLRRDRLNEQFVELGNILDPDRPKNDKATILCDTIQLLKDLTSQVSKLKDEYAMLNEESRELTLEKTDLREEKASLKSDIDNLNNQYQQQLRTMFPWTAMDHSVMMAPSSYPYPVPMAVPPGPIPMQPYPFFANQHPAVISNPCSTYVPYLAPNTIVEQQSTLYVSPPLHPCARSNVSGKQESKSKSSRESMAEKNEDSNDVTTDLELKTPGSSADQDLSSGQRKSSKLSRRESSCTEGSSLGRCSSSRSVQDSSSSSVAASRKDNE

SEQ ID NO: 31246 - protein, 283 aa, Glycine max
  Clone ID: TF_GmC253_3.pep
ISRSEVEPMDCTAARKTQKADREKLRRDRFNVQFVELGNILDPDRPKNDKATILGDTIQLLKDLTSEVSKLKDEYATLNEESCELAQEKNELREEKASLKSDILKLNNQYQQQLRTVSPWTATDRSIMLAPPSYPYPVPMPIPPAPIAMQPYPFYANQHSAIIPNPCSTFVPYLVPNTLTEQRSTQYMSPPVHPGFRSHVSGKQESRNKSSKESKAEKHEDSNDVTLTPGSSADQDLSSGQRKSSKLSRKESSCTEVSSLDRCSLSCSVQDSSSSSVVHKHKG

SEQ ID NO: 31247 - protein, 150 aa, Glycine max
  Clone ID: TF_LIB4165-033-Q1-K1-D8.pep
PHLLSIYIHSSSSHLFNLHKYIILQINRLIMEESGENWPSDNSYLDEVNDEFGSEDEEGGSFSGMGETDRKKRKRELAERFLALSATIPGFTKTDKTSILANASSYVKQLQQRVRELEQEVQSNVSSNEGATSSCEVNSSNDYYSGWWTK

SEQ ID NO: 31248 - protein, 176 aa, Glycine max
  unsure (1)..(176): unsure at all Xaa locations
  Clone ID: TF_LIB4165-033-Q1-N1-D8.pep
MKREVHFLEWARPPRKKRKRELAERFLALSATIPGFTKTDKTSILANASSYVKQLQXRVRELEQEVQSNVSSNEGATSSCEVNSSNDYYSGGGPNEILPEVKVRVLQKDVLIIIHCEKQKGIMLKILSQLENVNLSVVNSSVLRFGKITLDTHPLLLRFIFFYRQMLIFLLMERFQ

SEQ ID NO: 31249 - protein, 142 aa, Glycine max
  Clone ID: TF_jC-gmXLIB3563P088Aa07a1.pep
GAQPTLFQKRAALRKNMNMSDNKKRKEKDEVVVEDVSFDGSGLNYDSDDLTESNYNDPKEKNGGGGVSSNANSTVTGLDQKGKKKGMPAKNLMAQPRPPKKLNDRLYMLRSVVPKISKMDRASILGDAIEYLKELLQRINDL

SEQ ID NO: 31250 - protein, 81 aa, Glycine max
  Clone ID: TF_GmC253_4.pep
IRPEVEPMDCSAARKTQKADREKLRRDRINEQFVELGNILDPDRPKNDKATILCDTIQLLKDLISQVSKLRDEYAMLNEES

SEQ ID NO: 31251 - protein, 159 aa, Glycine max
  unsure (1)..(159): unsure at all Xaa locations
  Clone ID: TF_GmC253_6.pep
IRPEVEPMDCSAARKTQKADREKLRRDRINEQFVELGNILDPDRPKNDKATILCDTIQLLKDLISQVSKLKDEYAMLNEESRELTLEKTDLREEKASLKSDIDNLNNQYQQQLRTMFPWTAMEHSVMMAPSSYPYPVPLAVPPGPIXMQPYPFFANILQ

SEQ ID NO: 31252 - protein, 183 aa, Glycine max
  Clone ID: TF_GmC2714_3.pep
VRREKISERMKYLQDLVPGCNKVTGKAGMLDEIINYVQSLQRQVEFLSMKLAAVNPRLDLSIDDLFDKDVFSTCATNFPNIGISSTSDISNPAYLQFNSPQQIFSYDGLDPSDMGLRRTISAPVSMPETYLQSSCFTQMLPSSTWEGDFQNLCNFDFDQARATSFPSQLLSGLVEAGNLKMEM

SEQ ID NO: 31253 - protein, 142 aa, Glycine max
  Clone ID: TF_GmC206749_1.pep
PVGQGLLGAGEDRMEQSYSWENWALDKEMGEDEEEFLRDILSKPAFSSESESQAPVVSCSAKSKRAPMTYILSFDNSTITPAPSSPPTLEAQPGKRAKRASHIMAERKRRQQLTQSFIALSATIPGLNKILLSSLASVLEMK

SEQ ID NO: 31254 - protein, 188 aa, Glycine max
  unsure (1)..(188): unsure at all Xaa locations
  Clone ID: TF_LIB4164-021-Q1-K1-C4.pep
MCLPEGERDRERAMALEAVVFPQSQDPFGSGYGSVNTKDFYNYTLLAATYEQQHINKEEEQGGASISTFQPETSNYPYGDWTTSSSSSMLPHLNNELQETTTTTSNTLDSLNTRPKRRRAKSRKNKEEIENQRMTHIVVERNRRKQMNEYLSVLRSLMPDSYIQRGDQASIIGGXLLTFVKELEQKVH

SEQ ID NO: 31255 - protein, 66 aa, Glycine max
  Clone ID: TF_GmC234612_1.pep
MQHSFSGSFSYYPLEASHDHHAPSHEDKALAALRNHKEAEKRRRERINSHLDKLRTLLPCNSKVYI

SEQ ID NO: 31256 - protein, 211 aa, Glycine max
  Clone ID: TF_GmC6699_1.pep
MDQLGIIQPSSSTKVERRLVEKNRRNQMKNLYNKLNSLLPSYNPKEALPLPDQVDEAINYIKSLEAKVKMAQEKKENLQGIRKRSRGCFSNNSANFAATSGFPKSPQLEIHEVGSSLQVVLTCGLDHQFIFYEIIQILHEENIEVRSVNSSLAGDSVLHVVHAEIPQSFLQFGATKVSERLKRFVNGSCSDVETQPELWDFEIGTDDMWGF

SEQ ID NO: 31257 - protein, 157 aa, Glycine max
  Clone ID: TF_17518532.pep
MGQQQQGSQPSPTKVERKIVEKNRRSQMKNLYSELNSLLPTRNPKEAMSLPDQIDEAINYIKSLETKVKLEQEKKERLKERKRTRGGCSSSSEAQGSLKSPNIQIHETGNLLEVILTCGVDSQFMFCEIIRILHEENVEVINANSSMVGDLVIHVVH

SEQ ID NO: 31258 - protein, 51 aa, Glycine max
  Clone ID: TF_GmC2279_10.pep
MPSHKTFRIKKKLAKKMRQNRPIPYWIRMRTDNTIRYNAKRRHWRRTKLGF

SEQ ID NO: 31259 - protein, 348 aa, Glycine max
  unsure (1)..(348): unsure at all Xaa locations
  Clone ID: TF_GmC60110_1.pep
MALEAVVFPQDPFTYGCNNKDFLYSLVGGDGGGGGGSHEYGFQASSEDKPHVGIIINNNNIDHTLHANWDSSSPSVLQSVKEQWDSHSSPEACTVDQSLPRAFPLPPSSSSPEAASSATGRRKRRRTKSAKNKKEIENHRMTHIAVECNRRTRINEYLAVPRSLMPPSXVQRGDQASIIGGTSNFVKELEQLLQCMKGQKKRTKEGSGFSDSSPFSEFFMFPQYSTRATQSSSSSSSKGYPGTCEANNNMARNPSSWAVADIEVTLVDGHANMKILCKKRPGMLLKMVVGLLSLGLSILHLNVTTVDDMVLTSVSVKVEEGCQLNTVDEIAAAVHQLSRTVQEEAVFS

SEQ ID NO: 31260 - protein, 484 aa, Glycine max
  unsure (1)..(484): unsure at all Xaa locations
  Clone ID: TF_GmC1214_1.pep
MLLKKLIINMRMYIPLTIKLKKNPKRFFFISTLQRALLPTAAYSNLSHFVYQITLSITLTHTELESYFAHIRFYIFIAIDSHFGSHSFSLPSNVLSFPSHPQYQTNQFKVHTHTQLGEENREFSEKIRRRRGIGFPGKQYLGMLEYPLIDYVIHVRYFPFFGTRIRGSLDPHPPSMGASKFIRSFGIPMAPQLKHSIDRVDARIYLPLFQTPLHKKQFSIFLSPNHTFNYSNTTLSLEGFSPKIPRARAMVSPENSNWLFDYPLIDXDVIPVGDSSFAVSAWSFSWPPXPPMSVSKLMLRLGDSDGLKNPALKKRTKSDSSTASSSKACREDSXRRDRLNDKFVELGSILEPGRPPKTDKASILIDAARMVTQLRDEALKLKDSNTSLQEKIKELKAEKNELRDEKQRLKAEKEKLEVQVKSMNAQPAFLPPPPAIPAAFAPQGQAPGNKLVPFISYPGVAMWQFMPPAAVDTSQDHVLRPPVA

SEQ ID NO: 31261 - protein, 173 aa, Glycine max
  Clone ID: TF_GmC1094_1.pep
FTSSQAQYQTAKFEEKPNCPNTLLNKLKREESPDAAKKNSPEPAFKRQRIETPSPLPTFKVRKEKLGDRITALQQLVSPFGKTDTASVLHEAIEYIKFLHDQVSVLSTPYMKNNGAPIQHQQDCDNLKDSEGAKQDLRSRGLCLVPISSTFPVANETSVDFWTSTFGGALIGR

SEQ ID NO: 31262 - protein, 124 aa, Glycine max
  Clone ID: TF_GmC1094_2.pep
IETPSPLPTFKVRKEKLGDRITALQQLVSPFGKTDTASVLHEAIEYIKFLHDQVSVLRTPYMKNNGAPIQHQQDCDNLKDSEGPKQDLRSRGLCLVPVSSTFPVANETIVDFWTPTFGGALIGK

SEQ ID NO: 31263 - protein, 342 aa, Glycine max
  unsure (1)..(342): unsure at all Xaa locations
  Clone ID: TF_GmC5663_1.pep
MGSLERSKKKVLLWKKAMLHFSLCFVMGVFTGLAPTGKSSLFSTTVGVSNRTEFAPQPSEMLHLTTNVNRIWIAPMPDTMPVKPRILENEKKKXNKKLHAKKQPQLKPRRLIIIVTPTSTKLPHQAVFLRRLANTIKLVPQPLLWIVVEAKTNSKELPEILRKTGIMYRHVVFKENFTELEAELNHQRNLALKHIEHHRLNGIVHFAGLSNVYDLQFFHQLRDIEVFGTWPTALLAAHRKKVKIEGPVCDSSQVIGWHLKNMNNETDTITPPIHISSFAFNSSILWDSERWGRTSSVQDTSQNSIKFVKQVVLEDEAKLKGIPPEDCSKILLWRFNFRARTH

SEQ ID NO: 31264 - protein, 97 aa, Glycine max
  Clone ID: TF_LIB4164-013-Q1-N1-E8.pep
DVEKESVGVNKEVPARRNGAKKSRSAEVHNLSERRRRDRINEKMRALQELIPNCNKVDLCLISRLCFGTLWKVFNIVVCWLSLRIEASIEYIMVCLI

SEQ ID NO: 31265 - protein, 329 aa, Glycine max
  Clone ID: TF_GmC298_1.pep
MARSAKGHQDEFDDDDEEELLTANNTSFKVKVDEPSTGKRVNPQRSKHSETEQRRRSKINERQALKKRRRKNSFSRFQVLRDLIPQNDQKRDKASFLLEVIEYIQFLQEKLQIYEQTYEGWNQEPTKLTPWRNNHGPAENTTDPSQATQNGSVDEKNNNVSPLLPKNVQNPIESDFSMTTIQKGNIPGSTTEAVPLPMQMRLDMFDPPQLWLDKRNKGNYILPHNDTMKEQEELVNESGSDSISSAYSQGILDSLTQALHSSGVDMSQTNVSVQIDVGRQENAGLIPSASTSKGHENQSVSNPAIARSGVDYCNIDSEQSSKRLRQEAS

SEQ ID NO: 31266 - protein, 84 aa, Glycine max
  Clone ID: TF_LIB3167-024-P1-K1-G12.pep
MEESGENWPSDSYLDDFVNDDLGFDDEEFGSEDDSFSGMGETDRKKRQRELTERFLALSATIPGFKKTDKTSILANASSYVKQL

SEQ ID NO: 31267 - protein, 108 aa, Glycine max
  Clone ID: TF_GmC582_1.pep
EKISERMKILQDLVPGCNKVIGKALVLDEIINYIQSLQRQVEFLSMKLEAVNSRLNSGIEAFPPKDFGQQAFDPAGIPFGSQAPREYSRGSSPDWLHMQIGGSFERTT

SEQ ID NO: 31268 - protein, 139 aa, Glycine max
  unsure (1)..(139): unsure at all Xaa locations
  Clone ID: TF_LIB3242-176-Q1-J1-D9.pep
MESYYYSGWPLAQFNSAPNSDQLSPFSVPTTTQQTLPLVATSTSDPAAAASLQFGEFPSWPAPIAAEDRAASASKSHSQAEKRRRDRXNAQLATLRKLIPMSDKMDKATLLGSVVDHVKDLKRKAMDVSKAITVPTETD

SEQ ID NO: 31269 - protein, 173 aa, Glycine max
  Clone ID: TF_GmC819708_1.pep
DRLYMLRSVVPNISKMDRASILGDAIEYLKELLQRISELHNELESTPAGGSSSFLHHPLTPTTLPARMQEELCLSSLPSPEGHPANARVEVGLREGRGVNIHMFCDRKPGLLLSTMTALDNLGLDIQQAVISYVNGFAMDIFRAEQRNEGQDVHPEQIKAVLLDSAAGFHSMS

SEQ ID NO: 31270 - protein, 213 aa, Glycine max
  Clone ID: TF_GmC710842_1.pep
EKGELVEAPVKLERKGVSPERSIEALKNHSEAERRRRARINAHLDTLRSVIPGAKKLDKATLLGEVIRHLKELKTNATQASEGLMIPKDSDEIRVEEQEGGLNGFPYSIKASLCCEYKPGLLADIRQALDALHLMIIRAEIATLGGRMNSVFVIISCKEQNIEDPEYRQFLAGSVHQALRSVLDRFSVSQDMLESRKRRRISIFSSSSIGDFF

SEQ ID NO: 31271 - protein, 267 aa, Glycine max
  Clone ID: TF_GmC2302_1.pep
MIPDSTFSPAYSLAEIWPGMPHFPPPFPHPSSADHSTLTDLTATPRKTKDCSSSSSSASTAAADEDDCSKVLSSTTTATANLSNNDSGSNKQMKLGGSSVENDGFKAEAEASSAGGNKSSEQSNKPCEAPKQDYIHVRARRGQATDSHSLAERARREKISERMKILQDLVPGCNKVIGKALVLDEIINYIQSLQRQVEFLSMKLEAVNSRMNMNPTIDGFPSKDVGTQPFDIAGMVFGSQAARGYAQGSSPPGWLHMQIGGGFERTT

SEQ ID NO: 31272 - protein, 263 aa, Glycine max
  Clone ID: TF_GmC1355_1.pep
FSPRGKTREKEKDEEVEDLSFDGSGLNYDSDDLTESNYNNVSEGNTGKNGGVSSNANSTVITGLDQKGKKKGMPAKNLMAERRRRKKLNDRLYMLRSVVPKISKMDRASILGDAIEYLKELLQRINDLHNELESTPVGSSLTPVSSFHPLTPTPPTLPSRIKEELCPSSLPSPNGQPARVEVRLREGRAVNIHMFCARKPSLLLSTMRALDNLGLDIQQAVISCFNGFAMDIFRAEQCKEGQDVHPEQIKAVLLDSAGYNGMM

SEQ ID NO: 31273 - protein, 222 aa, Glycine max
  Clone ID: TF_GmC1598_1.pep
MVSVSVPNMRKPRFPTQTAKGSPKNQNFETKTSHGKRSPAHAQDHIMAERKRREKLSQSFIALAALVPGLKKMDKASVLGDAIKYVKELKERLTVLEEQSKKSRAESVVVLNKPDLSGDDDSSSCDESIGADSVSDSLFEVESRVSGKEMLLRIHCQKQKGLLVKLLAEIQSHHLFVANSSVLPFGDSILDITIVAQMGESYNLTTKELVKNLRVAALKILS

SEQ ID NO: 31274 - protein, 357 aa, Glycine max
  Clone ID: TF_GmC19_1.pep
MEQTTLEAIQFNEEIQGLMAAPAPDTVNYFKALLELPSTQAVELLHSPERARKPLRLTPPPNAALIERAAKFSVFAGENSPPPPDLACPSPAAPGARAAWVSVFAGPNATANSNSPEVKRELPETDANPSSTHGGGGAGSVSDLAVENQNLKTAKRKEREKKVKASSKKSKSVAAADEISGDGEKLPYVHVRVRRGQATDSHSLAERARREKINARMKLLQELVPGCNKISGTALVLDKIINHVQSLQNEVEILSMKLAAVNPVIDFNLDSLLATEGVTPMDCNFPPTVAPVMWPEIPQNGNRQQYQQPWPFDALHQPLWGREEDNTNFMTPENSLLSYDSSANSVSLHSNQLKMEL

SEQ ID NO: 31275 - protein, 647 aa, Glycine max
  Clone ID: TF_GmC414_1.pep
NFDLCETSCGYPAKPEKMVPENLKKQLALAVRSIHWSYAIFWTDSTTQPGVLSWGEGYYNGDIKTRKTSQGVELNSDQIGLQRSEQLRELFKSLKTVEVTPQTKRPSAAALSPEDLTDAEWYYLVCMSFIFNIGQGLPGRTLAKGQPIWLNNAHSSDCKIFSRSLLAKSASIETVVCFPFREGVIELGTTEQVPEDLSVIELIKTSFLNSLHANVPNKSVATLKSRNQEGLSYAAFDHNDYNVKSIPEVGYEIANTTSPDGSSNAFQANQPLDETFMIESITNGTSQVQNWQVIDDELSNCVHNSMNSSDCISQTFACPENIASAPKSNNPSDPCARNFQKCNNPKMTLVDPRSDDLHYQRVLSTLIKSSDQLLMGMHLQKFPQESSFVSWRKEQPMDCKWPRAGTSQKLLKKVLFEVPQMHLDGLHESQEENDYKEGMRVEADENGMNHVMSERRRRAKLNERFLTLRSMVPSISKDDKVSILDDAIDYLKKLERRVKELEAHRVVTDIETGTRRSPQDTVERTSDHYFRKNNNGKKPGMKKRKACGVDETEKEINSDALKGSYANDVTVSTSDNEIVIELKCPSKAGRLLEIMEAINSFNIDFSSVQSTEADGNLYLTIKSVLTGPSVATTKRIKQALQKLASKC

SEQ ID NO: 31276 - protein, 246 aa, Glycine max
  Clone ID: TF_GmC371374_1.pep
HQLHWSHCKKDVDFESPEAKKQVRGSTSTKRSRAAEVHNLSERRRRDRINEKMKALQELIPRCNKSDKASMLDEAIEYLKSLQLQVQMMSMGYGMVPMMFPGIQQYMPPMGMGIGMGMGMEMGMGMNRPVMPFPNMLASSTLPAATAAVHLGPRFPMPPFHMPHVATPDSSRMQGANHPDNNMLNSLGTLDPDQSCIPNFTDPYQEAHSHEEAQQQWKQTMNQPNVSKPSTSRGQENPEKHQSGKA

SEQ ID NO: 31277 - protein, 329 aa, Glycine max
  Clone ID: TF_GmC159_1.pep
MDQRKLRDSSNSKPASDAAPQHVTLTSNRFRNSQAAVREREKEKGEGENEDPSAARKVLKADREKLRRDRLNEHFQELGNALDPDRPKNDKATILTETVQMLKDLTAEVNRLKTEHKTLSEESRELMQEKNELREEKTSLKSDIENLNVQYQQRVRIMFPWSAIDPSAVISQPYSYPVPIHIPSAPISIHPSLQPFPFFGNQNPGHIPNPCSMYVPYTTPTSHPPVEPPSMMYASTSHASNQKESGSKSPGHRRSSGAERSSETDDVVTELELKMPGSSSTQQGCTSGGRKGKMKDRTIIGGSASSQYSSSLGLQDSSNSVGDIPKTDN

SEQ ID NO: 31278 - protein, 261 aa, Glycine max
  Clone ID: TF_GmC131137_1.pep
MVLAVTMENYYDSGWHMGNSSWAQCSDHSSSSFAVPTQILPHHVTDSASLQFGEFHSWALPIEGAAEERAISASKSHSQAEKRRRDRINAQLATLRKLIPKSDKMDKAALLGSVIDQVKDLKRKAMDVSRAFTVPTEIDEVSIDYDHVQDESCTKVNKLKDNIVIKASVCCDDRPELFPELIQVLKGLRLTAVKADIASVGGRIKSILVLCSKDREDSVCLATLKQSLKSAVTKIASSSMASSCPARSKRQRFFLPSHCLQ

SEQ ID NO: 31279 - protein, 381 aa, Glycine max
  Clone ID: TF_GmC138935_1.pep
MGDLFHFDKNLSSQDEISLFLRQILLRSSSPSHSMPAGSCTSNAAQQNVNAHHPSFTASQLQDGKILALDSTASFVSGSAACSSFKGHGASAANVSSSSAGVSENENDDYDCESEEGVEAPAEEVPTKAASSRSSSKRSRAAEVHNLSEKRRRGRINEKMKALQNLIPNSNKTDKASMLDEAIEYLKQLQLQVQMLSMRNGLSLHPMCFPEGLQPLQLSQMGMELSERNRFTSLNMSATLPLHQDNNPLHYASNLPNKHNLPNQPSVPYPPYIDNPETSFGLEPRIQTDMKPLQHKGGSSEPIRGEDILQHQQSSGIHSDANTLGGSQVVKEFESGTRLSFPFDTQACEPKDNSNSSQPCIGGRDHSGVIIRNSETNIVGR

SEQ ID NO: 31280 - protein, 57 aa, Glycine max
  Clone ID: TF_6913441.pep
EALDHIMSERNKRQELTSKFIALAAAIPGLKKMDKAHVLREAINYVKQLQERIEDLE

SEQ ID NO: 31281 - protein, 163 aa, Glycine max
  Clone ID: TF_jC-gmXLIB3563P013cc12a1.pep
SGEEGESKVTEQTSNKNGKSNANKNNNRETTSAETSKDNSKGSEVQNQKPEYIHVRARRGQATDSHSLAERVRREKISERMKYLQDLVPGCNKVAGKAGMLDEIINYVQSLQRQVEFLSMKLAAVNPRLDFNLDELFTKEVFPSCAQSFPNIGMPLDMSMSNN

SEQ ID NO: 31282 - protein, 140 aa, Glycine max
  Clone ID: TF_GmC821579_1.pep
FRMAAMQPIHIDPESVKQPKRRNVKISKDPQSVAARHRRERISERIRILQRLVPGGTKMDTASMLDEAIHYVKFLKTQVQSLQRASSANNNIRPLGTSTVNATGIGFPVAMSTTSNSTPYFPLPKPYQARHMENMHDRYD

SEQ ID NO: 31283 - protein, 320 aa, Glycine max
  Clone ID: TF_GmC141926_1.pep
MELSQLGFLEELVAPRRDSWNALSTGFCELLSNGCCWSFDTFLENPTFGAFSAPRFDSPYSSEVSAAYPFAADGFTMPLSELDPGSDEPPPPPPLPPSLEDAEIGFHDNNNKKKNNFEETKVVCKVEEKDREIPLFKIGMCDDGERKPKSKKLEGQPSKNLMAERRRRKRLNDRLSMLRSIVPKISKMDRTSILGDTIDYMKELLERIGKLQEEEGTSQINLLGISREQLKPNEAIFDVERRDQDTRISICCATKPGLLLSTVNTLEAIGLEIQQCVVSSFNDFSVEASCSEVAEQRDCIHPEEIKQALFRNAGFGEKCL

SEQ ID NO: 31284 - protein, 656 aa, Glycine max
  unsure (1)..(656): unsure at all Xaa locations
  Clone ID: TF_GmC2019_1.pep
MNLWTDENSSVMEAFMSSSDLSSIWPSPAPPQSTAVFNQDTLQHRLQALIEGARETWTYAIFWQSSYDYSGSTLLGWGDGYYKGDDDKAKAKAKAKVKVTSAAEQDHRKKVLRELNSLISGSSSSSAASDDVDEEVTDTEWFFLVSMTQSFVNGGGLPXRPSSTPLRCGSPXRPSLCLGLREGXQGHVFGLQTLVCIPSANGVVELGSTELIFQNPDLMNKVKVLFNFSNNNFDMGSSWPATSADQGENDPSSLWLSDPEVRDSINTVAATPSVTVPAQTQGISISKTMQLESSIQTPGSSTLTETPSSIHAIPQNQSVFSRELNFSEYGFDPKTGNNQNHHSLKPESGEILSFGESKRTSYGGVNGNSNSNSHFFSGQSPFVAAADENTNKNNINNNGKTKSPNSRGSNDDGMLSFTSGVILPASNLKSGGGGDSDHSDLEASVVKDPVVEPEKRPRKRGRKPANGREEPLNHVEAERQRREKLNQRFYALRAVVPNVSKMDKASLLGDAISYITELKSKLQTLESDKDGMQKQLEGVKKELEKTTENVSSNHAGNSSSCNNNNKLSNQKLIDVLEMDVKILGWDAMIRIHCSKKNHPGARLLTALMELDLDVHHANVNLVNDMTMLQATVKMGSRFYTQEQLRAALAAKVGDAR

SEQ ID NO: 31285 - protein, 197 aa, Glycine max
  Clone ID: TF_GmC2019_2.pep
KRGRKPANGREEPLNHVEAERQRREKLNQRFYALRAVVPNVSKMDKASLLGDAISYITELKSKLQTLESDKDVLHKQLEGVKKELEKTTDNVSSNHACNNNNNNKLSSNQPALIDLVEMDVKIIGWDAMITITCSKKNHPAATLMTALMELDLDVHYATVTLVNDLMIQQATVKMGSRFYTQEQLRAALSAKVGDVR

SEQ ID NO: 31286 - protein, 305 aa, Glycine max
  Clone ID: TF_GmC294898_1.pep
PDASRASSNGVWTTTLSAEPEAVRDHVPRTSPQNEKGKSEMLEPTTTSSSGGSGSSLGKNCSLSTRNQGQKRKGIDVEESEEQSEDTELKSALGNKSSQRAGLARRNRAAEVHNLSERRRRDRINEKMKALQQLIPHSSKTDKASMLEEAIEYLKSLQLQLQLMWMGSGMAPIMFPGIQHYMSQMGMGMATPPFPPIHNPMQLPRLPLDQSVSASQTPNQTLMSQNPILGAFNYHNQMQNPALSEQYARYMGYHLMQNASQPMNVFRYGPQGVRHSQTMITPSSNSSGNMSGAANIDEAVSGKMG

SEQ ID NO: 31287 - protein, 264 aa, Glycine max
  Clone ID: TF_GmC6836_1.pep
PVPVEILDDHTISCADIGIVAGVQETKKRRINQTQTQKPPRKNDNYVNSEHSDSDCPTLPTATTPTTSEPKKRGRKPILGRETPVNHVEAERQRREKLNHRFYALRAVVPNVSRMDKASLLSDAVAYISELKAKIEYLESQQPRDSSKKVKTEMTDTLDNHSTTTISTVVDQSGPEPRLGPSPLGLEVDVKIVGPDAMVRVQSENVNHPGARLMGALRDLEFQVHHASMSCVNDLMLQDVVVKLPNGMRSEEGLKSAILMRLDQ

SEQ ID NO: 31288 - protein, 194 aa, Glycine max
  Clone ID: TF_GmC301008_1.pep
ARAGYIHVRARRGQATDSHSLAERVRREKISKRMTTLQRLVPGCDKVTGKALVLDEIINYVQSLQNQVEFLSMKLASVNPMFFDSAMDLDTLMVRPDQKLSNIASPSPLPCVAQFRPHQAIAFADTITTPTTTTNSFPTANNDGYLLDYSSSLFLQGHRPNIFEDNGGQFWDVEDQRQKFLHPYRFGNNSGSFN

SEQ ID NO: 31289 - protein, 253 aa, Glycine max
  Clone ID: TF_GmC224511_1.pep
LPFRRFYGRSGCPGRPTRPAQSSLIKKAVELDGARSKTERKSTEACKSHREAERRRRQRINSHLSTLRTLLPNAAKSDKASLLGEVVEHVKRLRKQADDVTCGDSYSSRSGEPGSVRSEAWPFPGECDEVTVSYCDGEDGEPKRVKATVCCGDRTGLNRDVSQAIRSVRAKAVRAEMMTVGGRTKSVVVVEWEKEEEEVGALERALKAVVENRALVGFGMGPVILGQKRGRDCCASPSSEVDSDFLLRNGSFC

SEQ ID NO: 31290 - protein, 221 aa, Glycine max
  Clone ID: TF_GmC2279_5.pep
MGSLGAVNNSIEDAKFSSSRRLKNQPNYSSSGRMSSIAEIGDKGYRESSPDSEAFADGNDFMAGFQVGHWDDTAMMSDNVGGLKRFSEEDSKPFSGLNAVETQNETGQTHAPLAHQLSLPNTSAEIAAIEKFLQFSDSVPCKIRAKRGCATHPRSIAERVRRTKISERMRKLQDLVPNMDKQTNTADMLDLAVDYIKDLQKQVQTLSDCHAKCTCSHEKQQ

SEQ ID NO: 31291 - protein, 265 aa, Glycine max
  Clone ID: TF_GmC2279_8.pep
MEQGSFSMGLRHSGNNSNLTRHSSSPAGLFSQINIENVYAGVRGMGTLGAVNNSIEDAKFSSSRRLKNQPNYSSSGRMSSIAEIGDKGNRESSPDNEAFADGNDFITGFQVGHWDDAAIMSDNVGGLKRFRENDSKPFSGLNAAETQNETGQTHAPLAHQLSLPNTSAEIAAIEKFLQFSDSVPCKIRAKRGCATHPRSIAERVRRTKISERMRKLQDLVPNMDKQTNTADMLDLAVDYIKDLQKQVQTLSDCHAKCTCSHEKQQ

SEQ ID NO: 31292 - protein, 158 aa, Glycine max
  Clone ID: TF_GmC869_1.pep
HSMAAMREMIFRIAVMQPVHIDPESIKPPKRRNVKISKDPQSVAARHRRERISERIRILQRLVPGGTKMDTASMLDEAIHYVKFLKKQVQTLEQAGANTSPHSNTNSPNNHVVGAAGFPLGMSSNYSNNSSVNYSSLLMKGGCQPCQMFGSTSKQLLS

SEQ ID NO: 31293 - protein, 425 aa, Glycine max
  unsure (1)..(425): unsure at all Xaa locations
  Clone ID: TF_GmC1279_1.pep
MESDLQQHPPMFLDHHQQQMNSGLTRYRSAPSSYFSSIIDHEFYEHVFNRPSSPETERMLTRFVNSLGGGDADAEDSLATTQNPPTVVAVKEEVNQQPPDVTSMNNEPLVLQQQQQQQQQQQQSNNMYNYGSSGTQNFYQSTGRPPLPNQMKTGHGSSSNLIRHGSSPAGLFSNINIDITGYAAVVRGMGTMGAAANNTSEEANFSPATRMKNNAPNFSSGLMSSRAEVGNKSNTQNNNAENEGFAESQGNEFIPAGFPVGPWNDSAIMSDNVTGLKRFRDEDVKPFSGGLNAPESQNETGGQQPSSSALAHQLSLPNXLQKLQNTSAEMAAIEKFLQLSDSVPCKIRAKRGCATHPRSIAERVRRTKISERMRKLQDLVPNMDKQTNTADMLDLAVEYIKDLQNQVEALSDNRAKCTCLHKKQQ

SEQ ID NO: 31294 - protein, 196 aa, Glycine max
  Clone ID: TF_GmC1279_3.pep
MSSRAEVGNKSNTQNNNAEGEGFAESQGNEFIPAGFPVGPWNDSAIMSDNVTGLKRFRDEDVKPFSGGLNAPESQNETGGQQPSSSALAHQLSLPNTSAEMAAIEKFLQLSDSVPCKIRAKRGCATHPRSIAERVRRTKISERMRKLQDLVPNMDKQTNTADMLDLAVEYIKDLQNQVQTLSDNRAKCTCSHKKQQ

SEQ ID NO: 31295 - protein, 242 aa, Glycine max
  Clone ID: TF_GmC64817_1.pep
SNSSPPIQQHRSVSWYCCFFCLKPKAIRPRCFSLLPHTRKRLSENQNFEAESPKGHRSYKSPSHVRDHIIAERKRREKLSQSLIALAALIPGLKKMDKASVLGDAIKYVKELQERMRMLEEEDKNRDVESVVMVKKQRLSCCDDGSASHEDEENSERLPRVEARVLEKDVLLRIHCQKQKGLLLNILVEIQNLHLFVVNSSVLPFGDSVLDITIVAQMGTGYNLTINDLVKNLRVATLKSMS

SEQ ID NO: 31296 - protein, 175 aa, Glycine max
  Clone ID: TF_GmC521_1.pep
MRGVVCGDGKRVKTSESGKGEGETSSGKLAEQSGKPPSEPAKQDYIHVRARRGQATDSHSLAERARREKISERMKILQDIVPGCNKVIGKALVLDEIINYIQSLQRQVEFLSMKLEAVNSRLAPRIEVFPPKDFDQQTFDTTGMPFASQATREYSRGSSPEWLHMQVGGGYERAT

SEQ ID NO: 31297 - protein, 229 aa, Glycine max
  Clone ID: TF_GmC949_1.pep
MEPPLINDSTFSSANPSLSEIWPSHFPTDHTPSNKRHLSPSTDCGSNKHIKSSGSGSQDQNGALKAGEVDATSVAGNKLPEQTAKPSSSEQPPKQDYIHVRARRGQATDSHSLAERARREKISERMKILQDIVPGCNKVIGKALVLDEIINYIQSLQHQVEFLSMKLEAVNSRLSMSPTIECFPSKEVGTQPFDLAGIIFGSQPARGYAQGSQPGWLHMQIAGGFEKAT

SEQ ID NO: 31298 - protein, 208 aa, Glycine max
  unsure (1)..(208): unsure at all Xaa locations
  Clone ID: TF_GmC6831_2.pep
MENIGEEYKHYWETNMFLQTQELGSWGLDEALSGYYDSSSPDGAASSAASKNIVSERNRRKKLNERLFALRSVVPNISKMDKASIIKDAIDYIQHLHEQEKIIQAEIMELESGMPKKSPSYDFEQELLPVVLRSKKKRTEQLYDCVTSRNSPIEVLELRVTHMGEKIGVVSLTCSXRTDTMVKLCEVFESFELKIITANITSFSDRLL

SEQ ID NO: 31299 - protein, 118 aa, Glycine max
  unsure (1)..(118): unsure at all Xaa locations
  Clone ID: TF_6847396.pep
KXXFMGENMQVXXXKKPCTSASKAAXXKSNPXXDXQSVAAKNRRERISERLKILQELVPNGSKVDLVTMLEKAISYVKFLQLQVKVLAADEFWPVQGGKAPDISQVRQAIDAILSSQR

SEQ ID NO: 31300 - protein, 158 aa, Glycine max
  unsure (1)..(158): unsure at all Xaa locations
  Clone ID: TF_uC-gmroLIB3259P211c01b1.pep
GVRGAQELPSEGAKGNSENQQKGDQQPISTANKACGKNAKLGSQASDPXGGGVHVRARRGQATNSHSLAERVRREKISERMKFLQDLVPGCSKVTGKAVMLDEIINYVQSLQRQVEFLSMKLATVNPRLDFNIEGLLAKDILQQRPGPSTGLGFPLEY

SEQ ID NO: 31301 - protein, 138 aa, Glycine max
  Clone ID: TF_GmC1356_1.pep
RKQKARVTERQRRQRIADNLKALHELLPNPAEGSQAYVLDDIIDYVKYLQLQIKEQSGSRLLQADSTAIPLVFHEGYGHYINQKMLNEPLEEIMGKLVEDDSAAAVQLLESKGLFLLPMALVDELSEAVQMFGGSALV

SEQ ID NO: 31302 - protein, 396 aa, Glycine max
  Clone ID: TF_GmC133935_1.pep
MSQRVPNCDVDDNNNIPTTTKIPLLPNFNFISHEVPMLGYQAAELPCKKGQPSTYKGSHGNLTSTWDKPRTSGGTLESIVSQHVSENRYKLVTMDALVPCSEQQGTQKAVVSERLDACGKSRFPRVVAQEEVEKRAGVVARGTRGTTTLELGGCKDWSVSGSETCRRELSVTFNSATKGSPENTTSSGKQCTGTTTNDDRDSISHRISQGEVPDEDYKATKVHRSPGSFSRISASSVVHKQAERRRRDKINQRMKELQKLVPNSSKTDKASMLDEVIQYMKQLQAQVQMMNWMKMYTTQMLPITMQQQQQQQLKMSMMMAQMGMGMGMSKDMVMNMNSMNIPGFPPMLPFPSFMPMAPCGDQLQGTPEKSVTMDAYSTMASLYQQLFHPPASSSKN

SEQ ID NO: 31303 - protein, 108 aa, Glycine max
  Clone ID: TF_jC-gmst024100b03a1.pep
MNQKPTVGSPEWHQVRKNNHKEGTCSVERRRREAINEGINQIARLVPNCDKNKGAILQRAIEYINQLHEEKRQMSERWEQSNMTTSHAINEISAQNSKLKVEVNRPGD

SEQ ID NO: 31304 - protein, 203 aa, Glycine max
  Clone ID: TF_GmC1226_3.pep
MRAGKGSQEEDEYEEEEFGSSKKQGTSSAPNANKDGKAIDKASAIRSKHSVTEQRRRSKINERFQILRDLIPHSDQKRDTASFLLEVMEYVQYLQEKVQKYEGSYQGWGQEPLKLMPWRNSHWRVQSFAGQPTAVKNGLGPVSPFPVKFDESNASISPTMLSGTQNTIDPYQSRDIVNKTAERQPDLVNKGMPLPLAMHANMS

SEQ ID NO: 31305 - protein, 244 aa, Glycine max
  Clone ID: TF_GmC6831_1.pep
MENIGEEYKHYWETNMFLQTQELDSWGLDEALSGYYDSSSPDGAASSAASKNIVSERNRRKKLNERLFALRSVVPNISKMDKASIIKDAIEYIQHLHEQEKIIQAEIMELESGMPKKSPSYDFEQEQLPVVLRSKKKRTEQLYDCVTSRNSPIEVLELRVTHMGEKIVVVSLTCSKRTDTMVKLCEVFESLKLKIITANITSFSDRLLKIVFIEANEDEKDHLQIKIQTAIKALNNDPLSPMSI

SEQ ID NO: 31306 - protein, 84 aa, Glycine max
  Clone ID: TF_GmC94732_1.pep
MDFAAFVSHGSYVDKTFLSSDTNQVGITSRNPIQAQEHVIAERKRREKLSQRFIALSAILPGLKKMDKASVLGDAIKYVKQLQE

SEQ ID NO: 31307 - protein, 347 aa, Glycine max
  Clone ID: TF_GmC3871_1.pep
NYPAIVSAKPKTKNQTQTKPTKISPTSLSASCSFCVPNSFSRLYPDSPESTLKPALMANNPSDAPADDFLEQILGLPNFASADSGLSAADVGLAGAATQAPMMLQLNSADANAHLAGAAFHAPVYQLGLSLDQGKGGFMKPEEASASGKRFRDDVVDNRAKNVFHGQPMPTTMPAAPHPPAIRPRVRARRGQATDPHSIAERLRRERIAERIRALQELVPSVNKTDRAAMLDEIVDYVKFLRLQVKVLSMSRLGGAGAVAPLVTDIPLSSVEEEGGEGRNQPAWEKWSNDGTERQVAKLMEENVGAAMQFLQSKALCIMPVSLASAIYQSQPSDTSSIVKPETNPPS

SEQ ID NO: 31308 - protein, 283 aa, Glycine max
  Clone ID: TF_GmC3871_2.pep
MANHPSEAPTDDFLEQILGLSTFASADPAADASPMMLQLNSGDAATHLAATHLAAFHAPPYQLGLSLDQGKGPFLTPEDASGSGKRFRDDVVDTRPKNFFHGQPMPTTVPTAPHPPAVRPRVRARRGQATDPHSIAERLRRERIAERIRALQELVPSVNKTDRAAMLDEIVDYVKFLRLQVKVLSMSRLGGAGAVAPLVTDIPLSSVEEEGGEGRNQPAWEKWSNDGTERQVAKLMEENVGAAMQFLQSKALCIMPVSLASAIYQSQPSGTSSIVKPETNPPS

SEQ ID NO: 31309 - protein, 261 aa, Glycine max
  unsure (1)..(261): unsure at all Xaa locations
  Clone ID: TF_GmC3871_3.pep
ARATKSVQTEEIKNQTQTASCRFCVPNSFSRLNPDSPDSKLKLALMANNPSDAPADDFLEQILGLPTFASADSGLSAADVGLAGAATQSPMMLQLSSADANAHLAGASFHAPVYQLGLSLEQGKGRFMKPDEASASGKRFRDDVVDNRAKHVFHGQPMPTTMPAAPHPPAIRPRVRARRGQATDPHSIAERLRRERIAERIRALQELVPSVNKTDRAAMLDEIVDYVKFLRLQVKVLSMSRXGVGAGAVAPLGTDIPLSSV

SEQ ID NO: 31310 - protein, 439 aa, Glycine max
  Clone ID: TF_GmC3897_1.pep
LEPLEPDYCVRSSLASSAGIQTIVLVPTDMGVVELGSVRMLPESFELLQAVKSVFSTQSPSYQGVSVSTGGNAVFPGLAIGDANKVDGGVSIPKVFVNTIGNRTHFREKLAVRKMEDNRPWPGHGHPDPNGNNLHNNVSFPNVRGNSLHVSSWAVNSDLRQPGPLEIFAPRAPTSSVLAELANVGKQDFRPQRQVQMQIDFTGATSRPSSARPVVGELELSDVEASCREEQQPSFADERKPRKRGRKPANGREAPLNHVEAERQRREKLNQRFYALRSVVPNISKMDKASLLGDAIAYINELQAKVRIMEAEKERFGSTSNDGSVLEAKLRLENQEKKAPDVDIQAFQDEVIVKVSCPLDSHPVSKVIQTFNEAQISVVESKLAAANDTIFHTFVIKSQGPEQLTKDKLIAVFSPTESNSLQPLSQLDSKGIAVSIVHT

SEQ ID NO: 31311 - protein, 347 aa, Glycine max
  Clone ID: TF_GmC8207_1.pep
MRTSHMEISSIRGLPEMGIIEDPNFLHHWQLNSIDTTSLTGAPFGEILQKHSFSDNSNFNPKTSMETSPTGIERPAKQLRNNSWNHNKSQQQTPETQFASCSNLLSFVNSNYTSELGLVKPKVEMACPKIDNNALADMLISQGTLGNQNYIFKASQETKKIKTRPKLSQPQDHIIAERKRREKLSQRFIALSALVPGLKKMDKASVLGEAIKYLKQMQEKVSALEEEQNRKRTVESVVIVKKSQLSSDAEDSSSETGGTFVEALPEIEARFWERNVLIRIHCEKNKGVIEKTISEIEKLHLKVINSSALTFGSFILDITIIAQMDMEFCMTVKDLVRSLRSAFSYFV

SEQ ID NO: 31312 - protein, 266 aa, Glycine max
  Clone ID: TF_GmC126664_1.pep
MDPNHSPPDFTPHLTTLININSNNNNNAVPSSPSNFNFSDPHHYIPASDATTFKQHNINHNNNHTPDFTSSHVEKSVEASKPVPPPRSSSKRSRAAEFHNLSEKRRRSRINEKMKALQNLIPNSNKTDKASMLDEAIEYLKQLQLQVQMLMMRNGLSLHPMSLPGGLRPMIMPQTGLNLDGSNGFQNSTCAIASSSNDESLVRHAFSFPKQCSISNKSIGVPSVKNIATSDTSSTFHPSIKDALYGNMPQPFMDTTKIGKPSPDVS

SEQ ID NO: 31313 - protein, 403 aa, Glycine max
  unsure (1)..(403): unsure at all Xaa locations
  Clone ID: TF_GmC75820_1.pep
GEEGGGEVRRVRVVFDDDDEKVQRMRKGVLQKLHMTFGGSDEDNYAFGLDRVTDTEMFFLASMYFSFPRGLGGPGKCFASGKHLWVSDVLKSSFDYCVRSFLAKSAGIQTVVLVPTDFGVVEMGSVRMVGESFELLQAVKSVFSAQASSLLVPHMVKPIAPLDLVREKRDGSESANALLSGLAIGDKNKNINNHSNNRVEGVGVPKIFGQDLNCSTQFREKLAVRKMEERPRPWGGHPPKVNSIGFPNGVQGSSWGAGQVVRHLGPPEMLAPRLASSGTLPKLANGARHDFVHNNFEQQRPVQMQIDFSGATSRAASGRSIIAESEISDIEATCKEERVSVADDRRPRKRKRXPANGREEPLNHVEADRQRREKLNQRFYALRAVVPXFSKMDTSLLRDAIAP

SEQ ID NO: 31314 - protein, 251 aa, Glycine max
  Clone ID: TF_GmC126039_1.pep
MHHFAMDNSHLLQFLPNTTTTTTTTNTPFFHAAPHTHTMHHPLSTNSSNNTNYYPFHLSQITETPSHHDRALAAMKNHKEAEKRRRERINSHLDHLRTLLPCNSKTDKASLLAKVVQRVKELKQQTSEITELETVPSETDEITVLSTTGGDYASGGGDGRLIFKASLCCEDRSDLIPDLIEILNSLHLKTLKAEMATLGGRTRNVLVVAADKEHSIESIHFLQNSLRSILDRSSSGDRSKRRRGLDRRLMS

SEQ ID NO: 31315 - protein, 435 aa, Glycine max
  Clone ID: TF_GmC42302_1.pep
MSIVYSHAVKYSQGETRMNPEMDSNIGQHCHQQNSGLMRYRSAPSSLLTSLANNNNINNNTTTNGCVNGKAFRSVHNHHQQQRYPPSTSSEMETMLAKLISSNNSEPLQVKEEAVASVSQPPQQHNGYSYGSSPQMMYQTQQIQGLSMPNGSLGNAFDGSFSAVNSLASQNSTQPRLGASTNCNNLIRQKSSPAGFFSNYSVDNAMRDVASFRGCDVSNGQAITSSSGLHGGTLNLSSRPSSCSTRMPQIAENGNEDVEANYVESRNLRNDNINTTKCYMPSFTTDFWDGSAFSASRTASNRGEISFSTSKAMDIQDEDFGYQKVGLTHHLSLPGSSSRMATMEKLYQIQGSVPCKIRAKRGFATHPRSIAERERRTRISARIKKLQDLFPKSDKQTSTADMLDLAVEYIKDLQKQVKILRDTRAFGTSTSNQKH

SEQ ID NO: 31316 - protein, 195 aa, Glycine max
  unsure (1)..(195): unsure at all Xaa locations
  Clone ID: TF_jC-gmro02910073h08a1.pep
LEVHQDTLTYMFDFELYDFVADPNFDQFINLFRGENEDANCDHFGSDLINDCFANNQQQLLSCPANPFDQNNNNNAVNVYDPSSTFSSFSYYDRELKGEGGEELDEEHSSGTMTTTTNNAVGKPKVKTDMSKTLISERRRRGRMKEKLYALRSLVPNITKMDKASIIGDAASYVHDLQARAXKLEAEVAGLEASL

SEQ ID NO: 31317 - protein, 271 aa, Glycine max
  Clone ID: TF_GmC154228_1.pep
MVYSFYDKTSSSSGSDISGLFNPTLHNLGACNDLSSSPHSLVFESDKGELVKCLAAAKVGKSEICEAKALAALKNHSEAERRRRERINGHLATLRGLVPSTEKMDKATLLAEVISQVKELKKNAAEVSKGFLIPKDADEVKVEPYNDHEGGEGSMSYCATICCDFRPEILSDLRQTLDSLPLHLVKAEISTLAGRMKNVFVFTCCKENINNIDFEKCQALASTVHQALCSVMEKASASLDFSPRTSHASKRRRLCFIETSNSTCNHGSCLC

SEQ ID NO: 31318 - protein, 186 aa, Glycine max
  unsure (1)..(186): unsure at all Xaa locations
  Clone ID: TF_LIB4281-033-R1-K1-C5.pep
MANHPSEAPTDDFLEQILGLSTFASADPAADASPMMLQLNSGDAATHLAATHLAAFHAPPYQLGLSLDQGKGPFLTPEDASGSGKRFRDDVVDTRPKNFFHGQPMPTTVPTAPHPPAVRPRVRARRGQATDPHSIAERLRRERIAERIRAXQELVPSVNKTDRAAMLDEIVDYVKFFELQXKVLSM

SEQ ID NO: 31319 - protein, 332 aa, Glycine max
  Clone ID: TF_GmC8965_2.pep
MAGNSGSEGLGDDFFEQILAVPEAGTVGMLQLGSTTGGFRGASGLMPLGLNLEQAAFLRHQVNVDDDVVHVNVDDATIHQHHLTLHNNNTSSSPSSTAPITDRDSMHMRGLFSAFGQLHTPIRPTLPLPPPPRQPQLHLHHHNQQFQGQAAAAPASMAAMPQPPGIRPRVRARRGQATDPHSIAERLRRERIAERMKALQELVPSINKTDRAAMLDEIVDYVKFLRLQVKVLSMSRLGGAGAVAQLVADVPLSAVEGDQDIEGVSNEQAWDKWSNDGTEQQVAKLMEEDVGAAMQFLQSKALCIMPISLASSIFRMPQSEASTGIKPESNSH

SEQ ID NO: 31320 - protein, 231 aa, Glycine max
  Clone ID: TF_GmC227_1.pep
MDMNSSGGACGWLYDYGFDIPVAGSDFMASDSGGFSWGPQSYNFKGPSNMSLEMEYSLDSTVMENGPSKRLRTESCASGSKACREKLRRDKLNERFLELSSILEPGRQPKTDKVALLSDAARVVIQLRNEAERLKEMNDELQAKVKELKGEKNELRDEKNRLKEEKEKLEKQVKLTNIQPSFLPQAPDAKGQVGSHKLIPFIGYPGIAMWQFMSPAAVDTSKDHLLRPPVA

SEQ ID NO: 31321 - protein, 129 aa, Glycine max
  Clone ID: TF_GmC227_3.pep
PLCVFFFYLSPFSLFRLRTESCASGSKACREKLRRDKLNERFLELSSILEPGRQPKTDKVALLSDAARVVIQLRNEAERLKEMNDELQAKVKELKGEKNELRDEKNRLKEEKEKLEKQVKLTNIQPSFL

SEQ ID NO: 31322 - protein, 564 aa, Glycine max
  Clone ID: TF_GmC135879_1.pep
MYMSILKKNVKRQLQNWMLRRHRELLYQKDYQHFIWKIMDKRPMSTGDRPKMHDQTGCFDPNTTGESVPSLKDNFPQTLPPSSPMVVVGNTTTNSINNSLEENLRLSVEELSCNHHNPQHQQDHVSTYASGVTATSIEIPLPQHLGLNMGNSYINNNNNMDNHLVQEVIDAFPYQQSTWDPTIVQELQDMAYANHTEQTQQQQQNEQQFQQFETQNCSQSYNNPSSILDPPYPSPDLLNLLHMPRCSASSLLTNPSICLTNPTQNTPNFQNPMAFLGDLPIGSENTSASSVLYDPLFHLNLPPQPPALRELFQSLPRGYSLPTNSRNGSLFGGGDEMEGDGSQLDMGVLEFNRVTLTPSVGKGRRGKATKHFATEKQRREQLNGKYKILRNLIPSPTKTDRASVVGDAIDYIRELIRTVNELKLLVEKKRYAKDRCKRPKTEEDAAESCNIKPFGDPDGGIRTSWLQRKSKDSEVDVRIIDDDVTIKLFQRKKINCLLFVSKVLDELQLELHHVAGGHVGEYCSFLFNSKIMEGSSVYASAIANRVIDVLDSQYAAAVPHTNSY

SEQ ID NO: 31323 - protein, 194 aa, Glycine max
  Clone ID: TF_jC-gmXLIB3563P001be05a1.pep
RAESARAAREPSLGVTESAAKLGQWTSTERTSQSFSNNRHGGFSSRSSSQTTGQKNQSFIEMMKSARDSNAQDEVLESEETFFLKKEPSSNTQRELRVKVDAKSTDQKPNTPRSKHSATEQRRRSKINDRFQMLRELIPHSDQKRDKASFLLEVVEYIHFLQEKVHKYEGSFQGWSNEPEKLMPWRNNDKPAET

SEQ ID NO: 31324 - protein, 227 aa, Glycine max
  Clone ID: TF_GmC330_3.pep
MENIGEEYGYWPENDMLFQNEDLGSWAIMDEAALSGSGYYDSSSPDGTGASSSVASKNIVSERNRRKKLNDRLFALRAVVPNITKMDKASIIKDAIEYIQHLHDQEKRIQAEILDLESGNKLKNPTYEFDQDLPILLRSKKKRTEQLFDSVSSRNSPIEIIDLRVTYMGEKTFVVSLTCSKRTDTMVKLCAVFESLKLKVITANITSFSGTLLKTVFIQVSLPFCPS

SEQ ID NO: 31325 - protein, 153 aa, Glycine max
  Clone ID: TF_jC-gmst024125b09a1.pep
LEGQATCSHSLAERVRREKISERMKTLQRLVPGCDKVTGKALVLDEIINYVQSLQNQVEFLSMKLALVNPMFYDLAIDLDTLMVRPDQKLNYNIASPSPCLAQFRPNQAIAFADTTTTNSFPTANNGDYLLDYSSSLFLQGPRSNLLFEYNGQ

SEQ ID NO: 31326 - protein, 321 aa, Glycine max
  unsure (1)..(321): unsure at all Xaa locations
  Clone ID: TF_GmC1312_1.pep
VHEDTLKYMNDFELYDFVADSNFDQFINLIRGENEDANCDHFGSDLINDCFVNNQQQPLSSPANPFDQNNNNNNNDAVNVYDPSSTFSSFSCFDGELKGEGEEENDGEHSSGTTTTTTKNADGKLKLKTDRSKTLISERRRRGRMKEKLYALRSLVPNITKMDKASIIGDAVSYVHDLQAQARKLKAEVAGLEASLLVSENYQGSINNPKNVQVMARNISHPNCKKIMQVEXFQVEERGYLAKIVCNKGEGVAASLYRALESLAGFNVQNSNLATVGESFLLTFTLNVKGTEQEINLPNLKLWVTGALLNQGFEFVASFPA

SEQ ID NO: 31327 - protein, 157 aa, Glycine max
  Clone ID: TF_GmC544_1.pep
MQPTSGGGGLARFRSAPASWLESVLLKEEEEEEDPLSFTQLLSTIDDAPSHSQHQLYGAALSNKDKTPEIFMLEDSVPCRVRAKRGCATHPRSIAERVRRTRISDRIRKLQELVPNMDKQTNTADMLDEAVAYVKFLQKQIEELSEHQRRCKCVVQE

SEQ ID NO: 31328 - protein, 383 aa, Glycine max
  Clone ID: TF_GmC7716_1.pep
MDSNSRYQVQQQHQHNSGLPRFRSAPPANLKQQGEAANNNGSAWEGSEPLLRFLNSGDTHDTTSSPTLREFVDNKVSNNSKPAKESSSPLSRMNSQHSYSTSMLPSRSTVASAMMMFSSGKNQSAASFDASLLRQSSFPAGHFSNNISFQNGYDTMKGVGNYSGVNGNDGELSLSMNRMKNQISFSSISPSSSLGVLSPTSKIGTEGIRVTSTEDGRQGGSNGDARYFGPGFSYASWNEPSHHKRQRSSNDELLSDSQDGELGNQVQTLSHHLSLPRTSSDMFAMDSLLQFSDSVPCKIRAKRGFATHPRSIAERVRRSRISERIRKLQELVPNMDKQTSTAEMLDLAVDYIKDLQKEFKTLNDKRAKCKCINMQKSEADQVA

SEQ ID NO: 31329 - protein, 184 aa, Glycine max
  Clone ID: TF_GmC142014_1.pep
MVALFSPPVFSTKGWLLEEDPLSYDVSSEYSFPYQFYSPQTQIELEIERSTSPSPEDPAMVKKLSHNASERDRRKKVNHLVSSLRSLLPVADQTKKMSIPTTVSRVIKYIPELQQQVEALSKKKEDLLCRISRQLQGDAVNKESQRRISHHNSDFAVSTSRLNDCEAVVHISSYEAHKAPLSDI

SEQ ID NO: 31330 - protein, 288 aa, Glycine max
  Clone ID: TF_GmC85409_1.pep
MNSVEEQLEGENSVDPGELSWENHSYSYLTKESTTLLSNSSSLEEINTGFDMTSLKQDASPQKPKSCILSFEDSTLVPINPKKTCQIYDHGEHSKETQEKPHNRKPLKRGRRFSQTLDHILAERKRRENISRMFIALSALIPDLKKMDKASVLSNAIEYVKYLQQHVKDLEQENKKRKTESLGCFKINKTCDDKPIKKCPKVEARVSGKDVLIRVTCEKQKDIVLKLLAKLEAHNLCIVCSNVLPFGNSALSITSIAMMDHEFSMTVDTYDLVKMLTEELLECCKLQR

SEQ ID NO: 31331 - protein, 339 aa, Glycine max
  Clone ID: TF_GmC298_2.pep
MARSAKGHQDEFDEDDEEELLTGNISSKVKVDEPSTGKRVNPHRSKHSETEQRRRSKINERFQVLRDLIPQNDQKRDKASFLLEVIEYIQFLQEKLQIYEQTYEGWNQEPTKLTPWRNNHGPAENTTDPSQATQNGSVDEKNNNVSPLLPKNVQNPIESDFSMTTIQKGNIPGSTTEAVPLPMQMRLDMFDPVVSSSMATQHLLEPVSNVNMLSHTQPQLWLDKRNKGNYILPHNDTMKEQEELVNESGSDSISSAYSQGILDSLTQALHSSGVDMSQTNVSVQIDVGRQENAGLIPSASTSKGHENQSVSNPAIARSGVDYCNIDSEQSSKRLRQEAS

SEQ ID NO: 31332 - protein, 175 aa, Glycine max
  Clone ID: TF_15663066.pep
NLENLPKRLKSSIEVPKTSRNAKSRKNSKSASTSNDEDDRSLSLQVQRNNSCFSQSDSNAYLEPNGGASKDPAPPNLDRKSRATTSAAADPQSLYARKRRERINERLRILQNLVPNGTKVDISTMLEEAVQYVKFLQLQIKLLSSEDLWMYAPIVYNGINIGLDLGISPTKGRSM

SEQ ID NO: 31333 - protein, 422 aa, Glycine max
  Clone ID: TF_GmC3662_176.pep
MGFQHGNESILTCPTSGLSGANVNVSEMAISSVSIAKPSDVVNPFIASSAWDPLVSLSQVQSFGGSSMVSHSEFANSNSSYPLVLDNQGISNTSHLVQYMSDSNLGGMVPKVHSYASGGFSEMVGAGSFCQHRSADMANTGYPIHYNPIKEAPINGEQSQVEDSIPEEEAPGSAPSGNRRKRGLDHNSTFSPNKNAEGDAVNDSPGKASDGSKEHEKRPKVEQNNGADVRGKQSVKQAKDNNSQSGEAPKENFIHVRARRGQATNSHSLAERVRREKISERMRLLQELVPGCNKITGKAVMLDEIINYVQSLQQQVEFLSMKLATVNPELNFDVDRILSKDILQSRIGHGIGAYGPGINSSHTFPNGSFHGTLAGMSSTSSQFPPLPQNVLDHEFQSFYGIGYDSNTALDNLGPNGRLKTEL

SEQ ID NO: 31334 - protein, 220 aa, Glycine max
  Clone ID: TF_GmC1728_1.pep
MDSLEDSGCWDFLDYSFIDQAPPDFLWSNNNNSVSTEIDIPGDAVACQENTKKRGRTDSCFKAGSKACREKLRRERLNERFCDLSSVLEPGRPVRTDKPAILDDAIRVLSQLKTEAQELKKTNEKLLEEIKCLKAEKNELREEKLVLKADKERIEKQLKALPVAPAGFMAPPVAAAAAAYQAGVNKMAVYPNYGYIPMWQYLPQSVRDTSHDHELRPPAA

SEQ ID NO: 31335 - protein, 450 aa, Glycine max
  Clone ID: TF_GmC1767_1.pep
MSVMYSPVLNYSDVEHQLRKNQDMDSSIGHPQQHCHQPNSGLLRYCSAPSSLLASLIDNTIHGCVNEESFTSENHHHQQQQQQQHYLPSTSSEMETMLSKLLPSNNGWSNSEALQEFGGKPVKQEIGESIPQEPPQQNGYSYGGSQLIYQSQQIQGLPNGGSSSASGSAFDGSFGVVHSMASEDSIQSKMGIRNCSNLFRQKSSPAAFFSIENDLAALREVGSFKADDVSNGLVTASTGGLHSSHTFSSRPSSCLKRLPQIAENGNESLEENCDQSRNLVNDNGSSKCYIPSFTNELWESSAFNAPKTENEDEIMFSTSNILESQEADFSFQNLGLTHHLSLPSSSTKMSSIEKFLQIQGSVPCKIRAKRGFATHPRSIAERVRRTRISERIKKLQDLFPKSEKQTSTADMLDLAVEYIKDLQQKVKILSDCKAKCKCTSNEKHYTRTCA

SEQ ID NO: 31336 - protein, 647 aa, Glycine max
  Clone ID: TF_GmC5053_1.pep
MTEYRMNLWTDDNSSVMEAFMSSSDLSSLWLPTPQSAASTTTPGLETTRAPPPQSHSLLNQETLQQRLQTLIEGARESWTYAIFWQSCYDYSSGTSLLGWGDGYYKGEEDKDKVKTKAPKTRSSAEQDHRKKVLRELNSLISGPSASADDIDEEVTDTEWFFLVSMTQSFVNGSGLPGQAFFNSSPVWVAGPERLSESVCERAHQGQMFGLQTLVCIPSANGVVELASAEVIFQNPDLMNKVRDLFNFNNNNNNNNPETCSWALNCVATTDQGENDPSSLWLNPEIKDSSTVSPPNSTVNKTMHFETPGSSTLTETPSAAAAVHVPNSKSQGFFPRELNFSNSLKPESGEILSFGESKKSSYNGAFFPGVVAVEENNNNNKNKKKRSPVVSRSSIDDGMLSFTSLPAANIKSVNGACVGAGDSDHSDLEASVAKQVVEPEKRPRKRGRKPANGREEPLNHVEAERQRREKLNQRFYALRAVVPNVSKMDKASLLGDAILYINELKSKLNVLDSEKTELEKQLDSTKKELELATKNPPPPPPPPPPPGPPPSNSVEPKKTTSKLADLELEVKIIGWDAMVRIQCSKKNHPAARLMAALKDLDLEVHHASVSVVNDLMIQQATVNMGNKFYTQEQLLSALSSKVGDELR

SEQ ID NO: 31337 - protein, 190 aa, Glycine max
  Clone ID: TF_GmC385855_1.pep
MPQTQPKKKVRRSCETRHHIIAERKRRQELTGSIIALSATIPGLKKMDKAYVLREAVNYTKQLQERVKELENQNKVDSATFIRKSEASSDKNTGNCETNKEISLFEVEARVLDEEVLIGIHCEKQKDIVFKIHALLGKLHLSTTSSTVLPFGTSTLIINIIAQMNGENSMTMHDLVKKLRDYLLEVYDMQ

SEQ ID NO: 31338 - protein, 205 aa, Glycine max
  Clone ID: TF_GmC220815_1.pep
MIKVGDSCFSIVQNSSPIEEGGFRLISDTYQPECKKSRWDMSSSSNNINFQQPNSSISSSIEEPDPEAIAQMKEMIYRAAAFRPVNFGLEVAEKPKRKNVKISTDPQTVAARHRRERINEKIRVLQKLVPGGSKMDTASMLDEAANYLKFLRSQVKALESLGNKVDAMNCPPTSIAFSFNPSFPMQTPPLCHIHHSHGVKQNNPP

SEQ ID NO: 31339 - protein, 335 aa, Glycine max
  Clone ID: TF_GmC1226_1.pep
MRAGKGSQEEDEYEEEEFGSSKKQGTSSAPNTNKDGKAIDKASAIRSKHSVTEQRRRSKINERFQILRDLIPHSDQKRDTASFLLEVIEYVQYLQEKVQKYEGSYQGWGQEPSKLMPWRNSHWRVQSFAGQPTAVKNGLGPVSPFPGKFDESNVSISPTMLNGSQNTIDPDQSRDIVNKTAERQPDLVSKGIPLPLAMHANMSVPVRSDGVLAHPLQGTVSNAQSTECPTTSEPQNQQDELSVEGGTISISSAYSQGLLNNLTQALQSAGLDLSQASISVQINLGKRANKGLNCGTSSLKHHDNPSSNNQTIAHFRDAGSGEDSDQAQKRMKTYK

SEQ ID NO: 31340 - protein, 118 aa, Glycine max
  unsure (1)..(118): unsure at all Xaa locations
  Clone ID: TF_jC-gmXLIB3563P042ag07d1.pep
MRAGKGSQEEDEYEEEEFGSSKKQGTSSAPNTNKDGKAIDKASAIRSKHSVTEQRRRSKINERFQILRDLIPHSDQKRDTASFLLEVIEYVQYLQEKVXKYEGSYQGWGQEPSKLMPW

SEQ ID NO: 31341 - protein, 361 aa, Glycine max
  Clone ID: TF_GmC1598_2.pep
MDDYNLFPDECPLNLNLFDDQEFLSQDIASALQEQTQTLQQSLSSECPSKTVSNSSTDETTFDFERPAKLLKTTTSSSCCNSDSSTITKSLSPKLSPSSSFSSFQSQILSFDNPNPTSSSNTTTQFYGFDCTLNPTQNEMVSVSVPNMREPRFPTQTAEGSPKYQNFETKTSHAKRSPAHAQDHIMAERKRREKLSQSFIALAALVPGLKKMDKASVLGDAIEYVKELKERLTVLEEQSKKTRAESIVVLNKPDLSGDNDSSSCDESIDADSVSDSLFEVESRVSGKEMLLKIHCQKQRGLLVKLLAEIQSNHLFVANSSVLPFGNSILDITIVAQMGESYNLTTKELAKNLRVAALKILS

SEQ ID NO: 31342 - protein, 285 aa, Glycine max
  Clone ID: TF_GmC284_1.pep
TLPPKVPCTAIQSHASNHAQRVPNKHQEQSVGAIQASGDSDAGEAPANGAHAGPNPGQPKQRVRARRGQATDPHSIAERLRRERIAERMKALQELVPNANKTDKASMLDEIIDYVKFLQLQVKVLSMSRLGGAAAVAPLVADMSSEGGGDCIQANGKSNGGGAQASTTNTNTNQTTATTTSNDSLTMTEHQVAKLMEEDMGSAMQYLQGKGLCLMPISLATAISTATCPTRNVNVNPLINAAAGATHFPTAANPAGEGPSSPSMSVLTVQSAIAGNDGAASVSKP

SEQ ID NO: 31343 - protein, 246 aa, Glycine max
  Clone ID: TF_GmC284_2.pep
MRRPQGHSHSEPEPPHRARSPPTPGVSASTGSSGSLQPNNQTHHFQQHPQPQGQSFGASAPANGGGSGQPKQRVRARRGQATDPHSIAERLRRERIAERMKALQELVPNANKTDKASMLDEIIDYVKFLQLQVKVLSMSRLGGAAAVAPLVAEGGGDCIQAKRSNSNDSLAMTEQQVAKLMEEDMGSAMQYLQGKGLCLMPISLASAISKATCHPFINGDGPSSPRMSALTLANAVVKDAASVSKS

SEQ ID NO: 31344 - protein, 336 aa, Glycine max
  unsure (1)..(336): unsure at all Xaa locations
  Clone ID: TF_GmC284_3.pep
MLQHQLLRDSGLLNMPLSLPGNDVVVDASTFESPNPSGKASVQTLYNGFAGSLHGVGQSSNQTQHFQHPQGSSNPMQGQNFGAVPAGGGSATNQAPASGAAAGGAPAQPRQRVRARRGQATDPHSIAERLRRERIAERMKALQELVPNANKTDKASMLDEIIDYVKFLQLQVKVLSMSRLGGAAAVAPLVADMSSEGGGECIQANGKSNGGGAHAPNTNSSQTTATTTSNDSLTMSEHQVAKLMEEDMGSAMQYLQGKGCLMPIXLPRNLATCHTRNVTVNVPLINAAAAAQIPTAANPAGDGPSSPSMSVLTVQSAVAVNDGSAAVKDAASVSKP

SEQ ID NO: 31345 - protein, 212 aa, Glycine max
  Clone ID: TF_GmC1808_1.pep
MSNSNWVLDYDYLDNIPLTTLEPPNFSWSSSSPPPTLSVELDDSFGISDGLKENRSRKRLRSSDSKACREKMRRDRLNDRFMELGSILDPRKPLKMDKAVILSDAVRVVSQLREEAQKLRESTENLQEKINALKDEKNELRDEKQRLKVEKENLEQKVKALSSQPSFLAAAGQVVGSKLVPFMGYPGVAMWQFLSPAAVDTSQDHVLRPPVA

SEQ ID NO: 31346 - protein, 249 aa, Glycine max
  Clone ID: TF_GmC330_2.pep
MENIGEDQYGYLPETDLFFPNEDLGSWAIMDGEAVSWYYDSSSPDGTGASSSVASKNIVSERNRRKKLNDRLLALRAVVPNITKMDKASIIKDAIEYIQHLHEQEKRIQAEILDLESRNKFKNPTYEFDQDLPILLRSKKKKTEHLFDSLSSRNSPSIEIIELRVTYMREKTFVVNLTCSKRTDTMVKLCAVFESLKLKVITANITSFSGTLLKKTVFIQADEEEKDFLHIKIQTAISALNDPLSPMSI

SEQ ID NO: 31347 - protein, 518 aa, Glycine max
  Clone ID: TF_GmC11360_1.pep
MMIQKMFDPTRSGMTRSSSHVASIYDNDFLELVWENGEIVVRGGSSNRSRKTNDERIHEDASINKRTRLNPLLYSLEDHFPPQRDSDMSTSHQSNNGQDSCQSSQSKNSCKLHEEFANLLKPVSTGNSHLQQCLPSSPLKKQRTDSTQTPRPAKVNFSNFSIPAVFLKSTTTTTTNNYQGNSATQQTKNHSSPARVEEIEALKVDKSAKETQCFQKQTSLTVERSTKLPTPAVDEHSGCEKTTEGVLGIHRSQGQTSTSEALRAKAKAYNNNNINMCHEPLLASSSVCSLGASNDPNLGFRKHEDTDDSTYLSDNDGEPEDMVKQDREGNRVKRSRNPEVHNLSEKKRREKINKKMRTLKDLIPNCNKVDKASMLDDAIDYLKTLKLQLQANFQIMSMGSGLWPLMMGFRPPQLPIPPLSAITDNRLIQMFGSPNQIPPMPMPHAPFFPIIGNSATQSHLANNTTTTAAATTNLAEHLANSLHGNATKLAPPSQISFQHHHTSTSTPTLATPFIFPQK

SEQ ID NO: 31348 - protein, 303 aa, Glycine max
  Clone ID: TF_GmC1654_1.pep
MTLETLQSNEFSNFIIYDTISATPFSSHGSPEASFLESFVNYQEQHDHPTFDNCAMRTRKREASEPESIGRRQNSVAVQGRKKRRRKPRVCKNTEEAETQRITHITVERNRRKQMNEHLAVLRSLMPESYVQRGDQASIVGGAIEFVKELEHLLQSLEARKLQLLHQEVAQTNENTAISKLMQPPFAHCFSYPQYTWSQTPNKYTSKTKAAIADIEVTLIETHANLRILTRRSSHGQLTKLVAGFQTLCLTVLHLNVTTIDPLVFYSFSAKVEEGFQLGSVDGIATAVHHLLARIEEEASLCC

SEQ ID NO: 31349 - protein, 504 aa, Glycine max
  unsure (1)..(504): unsure at all Xaa locations
  Clone ID: TF_GmC277_1.pep
MVGEKFCVSEDDKGVLESVLGAEAVAFFISALSNNVFSRVVAPSAGADPALRQRLCQLVEGSKWNYAVFWQVAGLKSEGSGVPCLDGHCSDPKGERNGVGKEDEQEXRKKVLQKLDACFGGSVLKDANHVRLDRVSDLLMFYLSSMCYIFGFDSLCGPGSSFKSGKLIWASDAAGCLNQLESRSFMGKLAGLHTVVFVPLKSGVVELGSFEMVPEEQGVVEMVRTAFGESSPGQAKVFPKIFGHELSLGDTKSQSITISFSPKVEDDPGFTSDSYEVQALGVNHAYGNSSNGTLGDGNEGTLFPQLNQMMAGNFNAQARVPCLDLGNEDSSSIHADERKPKKRGRKPANGREEPLNHVEAERQRREKLNQRFYALRAVVPNISKMDKASLLGDAITFITDLQMKIKVLEAEKNMGNNKDQKLSLPDMDFQEREDDTVVTVRCPLDIHPVSNVVKTFREHQIVAQDSNVSTADDKIIHTFSIRTEGGEAAAIQLKEKLEASLSKS

SEQ ID NO: 31350 - protein, 368 aa, Glycine max
  Clone ID: TF_GmC1376_1.pep
MTTEGGPNTSLLVWFFPFIVFLLKVLKLFCYVFARGRERAMALEAVVFPQSQDPFGGSGYGSVNNKDFYNCTLLAATSPNSWGDYEQHININKEEEQGGASISTFQPESNYPYGNWTSSSSSMLPHFNNELQETTTTDPSNTLDSLNTRPKRRRAKSRKNKEEIENQRMTHIAVERNRRKQMNEYLSVLRSLMPDSYIQRGDQASIIGGAINFVKELEQRMHFLGAQKEGEGKSEAGGATNMPFSEFFTFPQYSTSGGGGCSDNSAAVGEDVGEVKCGIADIEVTMVESHANLKIRSKKRPKQLLKLVSGLHTMRLTILHLNVTTTGEVVLYSLSVKVEDDCKLGSVDDIAAAVYQMLDKIQQEAMLN

SEQ ID NO: 31351 - protein, 250 aa, Glycine max
  unsure (1)..(250): unsure at all Xaa locations
  Clone ID: TF_GmC3897_2.pep
VRSSLANSAGIQTIVLVPTDLGVVELGSVRMLPESFELLQAVKSVFSTPIPKXFGEHNSHQTHFREKLAVRKMEDNRPWNNNNVSFPNVRSNGLHVSSCWPVNSGLRQPAPRVVAELANGVRQDLRLSNSYEPQRQVQMQIDFSGGTSRPSDVEASCKEEQPSVADERKPRKRXRKPANGREEPLNHVEAERQRREKLNQRFYALRSVVPNIXKMDKASLLGDTIAYINELQAKVKIMEAERERFESISN

SEQ ID NO: 31352 - protein, 104 aa, Glycine max
  Clone ID: TF_12488088.pep
VRISSDPQTVAARQRRERISERIRVLQKIVPGGSKMDTASMLDEAANYLKFLRSQVKALENLGNKLDTMNCPPTNIAFSFNPSFPIQTHFPMQNPSSHIQYSKG

SEQ ID NO: 31353 - protein, 328 aa, Glycine max
  Clone ID: TF_GmC693_1.pep
MCLPEGERGMALEAVVYPQPQDPFGHGIKDPSYNYNNLLEGGGGNWGYADFNLEKEDRTCVPFLANQTENYPYGEWNCSPSPPSMLPQLNIASNPQSSETSNTQNNLDSSVSTPARPKRRRTKSRKNKEEIENQRMTHIAVERNRRKQMNEYLSVLRSLMPESYVQRGDQASIIGGAINFVKELEQRLQFLGAQKEKEAKSDVLFSEFFSFPQYSTSASGGCDNSTAMSEQKSEAQSGIADIEVTMVESHANLKIRSKKRPKQLLKIVSSLHGMRLTILHLNVTTTGEIVLYSLSVKVEEDCKLGSVDEIAAAVYQILDRIQQETISN

SEQ ID NO: 31354 - protein, 195 aa, Glycine max
  unsure (1)..(195): unsure at all Xaa locations
  Clone ID: TF_GmC693_2.pep
MCLPEGERGMALEAVVYPQPQDPFGYGIKDPSYNYNNLLEGGGGNWGFEKEEQGFVTFLENQTENYPYGEWNCSPSPPSMLPHLNASNPQSSETSNIHNNLDSSISTPARPKRRRTKSRKNKEEIENQRMTHIAVERNRRKQMNEYLSVLRSLMPESYVQRGDQASIIGGAINFVKELEQRLQXLGWSERERGEI

SEQ ID NO: 31355 - protein, 201 aa, Glycine max
  Clone ID: TF_GmC25403_2.pep
MVVDKLETGEQVTQKVNIPVDKKRRTRNGSSFTSNPQSKDTATEGKNKKQRKNNGGLKEEDKAKEEKKDQRKCPEEPPTGYIHVRARRGQATDSHSLAERVRREKISERMKVLQRLVPGCDKVTGKALMLDEIINYVQSLQNQVEFLSMKLASVNPMFYDLATDLDTLLVRPEKLNSMASPSPLPSMSHCNSPNTQATTFC

SEQ ID NO: 31356 - protein, 286 aa, Glycine max
  unsure (1)..(286): unsure at all Xaa locations
  Clone ID: TF_GmC6805_1.pep
MYPSSSSSSSSSSQSMTQAGLTRYGSAPGSLLTSTVDSLIGGSRPSPYFSGESSESPCKEQRSFHNHPPFFASSLLRQKSSPAGFLSHLSNHHGVXSPSPPGGLSNSNSNSNCSLLKSQLSFTHESLSNTVNVDPSSTTFGMDPWDNNSIAFSATSTKRSKTNTNDPDILHSLNSALESQFNLPHTSLEMSTVDKLLHIPEDSVPCKIRAKRGCATHPRSIAERERRTRISGKLKKLQDLVPNMDKQTSYADMLDLAVQHIKGLQTQVQKLHKEMENCTCGCKQSK

SEQ ID NO: 31357 - protein, 233 aa, Glycine max
  Clone ID: TF_GmC191104_1.pep
RPTRPRTRGSGLNYESDEQNESNGLKLSENGGDNKGKKKGLPAKNLMAERRRRKKLNDRLYMLRSVVPKISKMDRASILGDAIDYLKELLQRINDLHHELESTPPGSSLTPSSSTSFQPLTPTLPTLPCRVKEELYPGTLPSPKNQAAKVEVRVREGRTVNIHMFCTRRPGLLLSTMKALDNLGLDVQQAVISCFNGFALDVFKAEQCREGQDVLPEQIKAVLSDSAGFHGMM

SEQ ID NO: 31358 - protein, 410 aa, Glycine max
  Clone ID: TF_GmC584477_1.pep
MALSKDQRIPHDSSLSSKVQNCVFSETSVEITSMTVHRVNEYHKSVLEEEDGSQTTNGLSNDSAVTRSPPLCGSRKDYAYKGTNYQLEEAVSLIDFKGYSNILQASGSLLSFQQNKMVPLNCYLKDNGQKEYCVWENNLHQGHNHWNQTSPRSTRDMRLVENLNCFQTSSGYSPIVNNAKEKQHGQSSSGWLYSAPTIPNDISSLHKLGAQESVLQKRPSMGENMKAAKKQCSTESKTPKHKSSPSKDPQSVAAKNRRERISERLKILQELVPNGSKVDLVTMLEKAISYVKFLQLQVKVLATDEFWPVQGGKPPEISQVKEVIDVILSSQRERSSCSKIQEDINHANLSQYQRNYAAAIAGKNKSDKIINCNLTFLQIDNSRMSCYPRSSHDGPCNSLKVRVGYFLARF

SEQ ID NO: 31359 - protein, 334 aa, Glycine max
  Clone ID: TF_GmC21758_1.pep
MELSQLGFLDELLAPRKDTTWSNALSTGLNELLLPSGWSFDSFDENQGLATLNPSFAAFSTPLDHRFECPYGSEAAYPFVDGFTLPELDSSYTRNDESAPLLPQEDNPSLEDEEFGFLGSDNQSLEQAKIGCKIEEQVTEIPVFNMGLCGEKKPKSKKLEGHPSKNLMAERRRRKRLNDRLSMLRSIVPKISKMDRTSILGDTIDYMKELLERIGKLQEEEIEEGTNQINLLGISKELKPNEVMVRNSPKFDVERRDQDTRISICCATKPGLLLSTVNTLEALGLEIHQCVISSFNDFSMQASCSGAAEQRNCMNQEEIKQALFRNAGYGGRCL

SEQ ID NO: 31360 - protein, 341 aa, Glycine max
  Clone ID: TF_GmC18720_1.pep
MEESWENWHLHMETGCENDFLGKCHGTDDDEFFRDILQQPPPAAFSSESESDHSFLAVQNTSSIPNDGAVLSPRNYLVKSSSSNSLVSQNASKRPRRLSSPRTYILSFDNSTMVPATPETRPRSSNNSPLPAKRALESPGPVARRPNQGAKKIRTSSQTIDHIMAERRRRQELTERFIALSATIPGLNKTDKASVLRAAIDYVKQLQERVQELEKQDKKRSTESVIFIKKPDPNGNDEDTTSTETNCSILPEMEARVMGKEVLIEIHCEKENGVELKILDHLENLHLSVTGSSVLPFGNSALCITITTQMGDGYQMTVNDLVKNLRQLFSKSHVLSDSDPY

SEQ ID NO: 31361 - protein, 346 aa, Glycine max
  Clone ID: TF_GmC5806_1.pep
MIQEDQGQCSSQAINNYHQAYQEQLLLQQQMQQQQQNNDIFGGGGGLNMYPGAEVSPIMNHHHQPWSMTMPHHHHHHQVHDPFLVPPQPSPYASLFNRRGPSLHQFAYDHHGSSSDHLRIISESLVGPVVQPGSAVPFGLQTELAKMTAQEIMEAKALAASKSHSEAERRRRERINNHLAKLRSLLPSTTKTDKASLLAEVIQHVKELKRQTSLIAETSPVPTEADELTVVDEADEDGNSVIKASLCCEDRSDLFPELIKTLKALRLRTLKAEITTLGGRVKNVLFITGEETDSSSSEDHSQQQQQCCISSIQEALKAVMEKSVGDHHESASANIKRQRTNIISMS

SEQ ID NO: 31362 - protein, 216 aa, Glycine max
  Clone ID: TF_GmC5806_2.pep
MIQEDQGQCSSQAINNYHQAYQEQLLLQQQMQQQQQQQQQNNDIFGGGLNMYPGGEVSQIMHHHHHQPWSMTMPHHHHHHHQVHDPFLVPPQTSPYASLFNRRGPSLQFAYDHGSSSDHLRIISESFVGPVVQPGSAPFGLQTELAKMTAQEIMEAKALAASKSHSEAERRRRERINNHLAKLRSLLPSTTKTDKASLLAEVIQHVKELKRQTSLI

SEQ ID NO: 31363 - protein, 208 aa, Glycine max
  Clone ID: TF_GmC886_1.pep
LLQRSFLPLLSSFFPVEKLLSSRFFKVGCDTSDKAPMLDEAISYLKSLQYDEQMLSMGCGMVPVMFPGIQQYMPAMGMGVGMGMGMGMGMNRPVMPFPNMLPGSALPAATAAAAHLGPRFSMPPFHMPHVPAPDSSRMQAANQSDNNMVTSAGPPDPNQSRIPNFTDPYQQYLGPHQMQFQLIQNQAMNQPNVSKPSNNGGPANPENH

SEQ ID NO: 31364 - protein, 313 aa, Glycine max
  unsure (1)..(313): unsure at all Xaa locations
  Clone ID: TF_GmC256128_1.pep
QAGHVGPRHVHVGCSTRVGSCCGGRGRRGMRRLGGIRAXSGSATFGRDSKHVTLDTCDREFGVGSTSTSINSLENTSSAKHCTKTTTVDDHDSVSHSKPVGEDQDEGKKKRANGKSSVSTKRSRAAAIHNQSERKRRDKINQRMKTLQKLVPNSSKSDKASMLDEVIEYLKQLQAQLQMINRINMSSMMLPLTMQQQLQMSMMSPMGMGLGMGMGMGMGMGMDMNSMNRAHIPGIPPVLHPSAFMPMAASWDAAVAAAAGGGDRLQGTPASVMPDPLSTIFGCQSQPMTMDAYSRLAAMYQQLHQPPTSGSKN

SEQ ID NO: 31365 - protein, 458 aa, Glycine max
  unsure (1)..(458): unsure at all Xaa locations
  Clone ID: TF_GmC993_1.pep
MSTELNANSTFKTIKSCDINTEQDFSMENRILSDILQSHEAFNYNMSRKDFVLPELDGFGSSIGAGSDEIEISPHSQPLVGASSYINCNNNSTNTSCYSTPLSSSPKGMPLSLGTSTSSNSTVTEFSADPGFAERAAKLSCFGSRSFXSCRNTQLSLNNAELGLISSPLVENGKKQLPRVSSSPSLKVLGSQMDTGEKPSPYVNSRKRKGPSKGKAKETSTSTNPPMAAEASDDSNAKRSKPNEGEGNENGHKKAEEALKGGQATDSHSLAERVRREKISERMKLLQDLVPGCNKVTGKALMLDEIINYVQSLQRQVEFLSMKLASVNTRLDFSIESLISKDIFQSNNSLAHPIFLIDSSAPPFYGQHPQPNPAVHNNIPNGTMTHNSVDPLDTGMWIPGFGMHLPHLNDFNEGGFQYPKPFSEDDLHTIIQMGFGQNANRITPIQSQSFNGSNQVPL

SEQ ID NO: 31366 - protein, 237 aa, Glycine max
  Clone ID: TF_GmC1795_3.pep
PVLKKFKRLKKGRRDIEEEPSGLSDEEELVGSGKAGRTAEEKLKRSLFGDDEGAPLEDIAEEEEQGEEEEDADIEEELENRGREQEKLQSELKKLQKLKEFKPTMNLPVLKDNEEKKDKKKKGCSEKKRPSPPYILWMKDQWNEIKSFGIIKFFLFSLFYLLKANSEAEFKEISTMLGSKWKTVTAEEKKPYEEIYHAEKEAYLQMIAKEKRETEAMRLLEDEQKQKTAMELLEQYM

SEQ ID NO: 31367 - protein, 101 aa, Glycine max
  unsure (1)..(101): unsure at all Xaa locations
  Clone ID: TF_22522754.pep
KPIRPPNAFFVFPEEVKKSFNAENTNAKAASNDAKPGXRNVNPXSSAEKAPYEIIAAKRKSDSEKLIQAYDNKYASSSNDEESYESKSEVNDDHDASGDDE

SEQ ID NO: 31368 - protein, 149 aa, Glycine max
  unsure (1)..(149): unsure at all Xaa locations
  Clone ID: TF_LIB3028-039-Q1-B1-C3.pep
GKSKTESKRADAKLAVNKNGAATKTRKPAGKGKAAKDPNKPKRPPSAFFVFMEEFRKVFNKERPDNKAVSAVGKGGWARWETMSXAGKAPYVGKSERREVECEKNMRAYNKKQAEGPTGGDEEKSEKSVSEVNGXDGYEEGHWEEEDDE

SEQ ID NO: 31369 - protein, 89 aa, Glycine max
  unsure (1)..(89): unsure at all Xaa locations
  Clone ID: TF_jC-gmXLIB3563P058bb03a1.pep
MKGGKNNTESKRAYAELAEDKKGAATNTTKSAGXANAAKDPNKPYRPPSAFFVFMEEFRKAFNXEHPGYKAKSAEGKSAGAKXKTMSDA

SEQ ID NO: 31370 - protein, 135 aa, Glycine max
  Clone ID: TF_GmC11_3.pep
MPSGISNFVSFRLKRKGAGAGRKQSKKAAKDPNKPKRPPSAFFVFMSEFREQFKKEHPNNKSVAVVGKAGGDKWKSLSDAEKAPFVATAEKKKQEYEKTILAYNKKLEGKNSEEDESDKSKSEVNDDEEDEVDGD

SEQ ID NO: 31371 - protein, 52 aa, Glycine max
  Clone ID: TF_GmC40409_2.pep
LRGLKIGNASGKKWISMTNEEKVKYYDIASEKRIEFDRAMAKFNNKMESGGV

SEQ ID NO: 31372 - protein, 63 aa, Glycine max
  Clone ID: TF_LIB3242-472-P1-J1-E9.pep
FGSRVGKAGGEKWKSLSDAEKAPFVATAEKKKQEYEKTISAYNKQLVNTFYPMYFFTSYSYCI

SEQ ID NO: 31373 - protein, 172 aa, Glycine max
  unsure (1)..(172): unsure at all Xaa locations
  Clone ID: TF_GmC11_4.pep
IPSQYNLTHFLSLSLFLSDSYIVCALAPNNHKICTVAEIGLNDACRRESATLWLKRKGTGAAGRKQSKKAAKVPNKRKRPPSAFFIFMSEFREQFKKEHPNLLMISTFXNLVCINLMFHEKXPFVAMAKKKKPEXXKTILAYXXKWXGKNPEEYESDKSKFEVHDDEAIEDC

SEQ ID NO: 31374 - protein, 93 aa, Glycine max
  Clone ID: TF_uC-gmroLIB3259P245c07b1.pep
VFCKKEHPNNKAGAGVGKAGGDKWQSLADAEKAPFAATAEKKKQEYEKTILAYNKKWEGTNPEEDESDKAKSEVNDDEEDEDEEDDDDDERRR

SEQ ID NO: 31375 - protein, 91 aa, Glycine max
  unsure (1)..(91): unsure at all Xaa locations
  Clone ID: TF_jC-gmXLIB3564P090af01b1.pep
QSMTESKRADPKLRXNKMGAGTMAKKPAGHAKAAKDPNKPXRPPSAFFVSMEDCRRVFTIEHPENIALPAESIAAGAKWKTMSDAERAPYV

SEQ ID NO: 31376 - protein, 159 aa, Glycine max
  unsure (1)..(159): unsure at all Xaa locations
  Clone ID: TF_GmC2181_16.pep
MKNAKGKGAARASKESLKPVDDRKVGKRKASGKPGRSSAPKKEKKAKKDPNKPKRPPSAFFVFLFVSSLLFPSYLSLRKMIXLIFLLCDSEEFRKTFKAENPNVKAVSVVGKAGGEKWKSLSSAVSFAIVINNGSFCYLLNYLTLHCFFSCFQYKFILK

SEQ ID NO: 31377 - protein, 88 aa, Glycine max
  Clone ID: TF_uC-gmropic112g01b1.pep
MKGGKSKTESKRADAKLAVNKKGAATKTRKPAGKGKAAKDPNKPKRPPSAFFVFMEEFRKVFNKEHPDNKAVSAVSVSVVKMSGDHII

SEQ ID NO: 31378 - protein, 117 aa, Glycine max
  unsure (1)..(117): unsure at all Xaa locations
  Clone ID: TF_LIB4281-020-R1-K1-D4.pep
HSLIRVLQDAFLVFMEEFKKAFNKEHPDNKALSAVFKSXMDQRWKTMSDAEKAPYVAKSEKRKVEYEKNMKAYNKKHAEGPTDGDETRXEKSVSEXNDEDDXEECIVEEEDDDYRMH

SEQ ID NO: 31379 - protein, 95 aa, Glycine max
  Clone ID: TF_GmC2181_49.pep
MGKGTGSFGKRRNKTHTLCVRCGRRSFHLQKSRCAACAFPAARTRKYNWSVKAIRRKTTGTGRMRYLRNVPRRFKSGFREGTEAAPRKKGAATTA

SEQ ID NO: 31380 - protein, 83 aa, Glycine max
  unsure (1)..(83): unsure at all Xaa locations
  Clone ID: TF_LIB3040-049-Q1-E1-C1.pep
MKRGKSKXESNRADAKPAVNKKGAAITTRKPAGKGNASKDSNKPKTPPSAFFVFMEEIMNVFNKEHPDSKTVSAVGKTAGAKW

SEQ ID NO: 31381 - protein, 123 aa, Glycine max
  unsure (1)..(123): unsure at all Xaa locations
  Clone ID: TF_LIB3242-438-P1-J1-G8.pep
MAKKVKGSHSASSASASSRKLVLRIKSNEGIKRSVRQTNSRKKPKAKQKKNKQMFDAMKPKKPPTAFFYFLXCHLKSRWDSFYLVHFYFSREDFRKEFQEQNPDVKSMRDIGKACGEKWKTVT

SEQ ID NO: 31382 - protein, 94 aa, Glycine max
  unsure (1)..(94): unsure at all Xaa locations
  Clone ID: TF_LIB3242-696-P1-K1-F7.pep
RPRVRRPPSAFFLFMGEFRGVFNKKHPENQTVSSLGKTSXTKWKTIFLFXKAPYVAKSEKRKVEYEKNXMRAYNKKQAEGPTCGDEKESEKSLS

SEQ ID NO: 31383 - protein, 73 aa, Glycine max
  Clone ID: TF_LIB3040-034-Q1-E1-A2.pep
MAKAISDAEGADRRLKRKGAGAGRKQSTKAAKDSNKPERPPSTFFGFMSEFIEQFKMEHPNNTAVAVVGKAGW

SEQ ID NO: 31384 - protein, 137 aa, Glycine max
  Clone ID: TF_LIB4164-047-Q1-K1-D2.pep
MPKAKSDAKAADSRLKRKGAGAGRKQSRKAAKDPNKPKRPPSAFFVFMSEFREQFKKEHPNNKSVAVVGKAGGEKWKSLSDAEKAPFVATAEKKKQEYEKTISAYNKQLEGKNSEEDESDKSKSEVNDDEEDEVELI

SEQ ID NO: 31385 - protein, 119 aa, Glycine max
  Clone ID: TF_LIB4203-002-R1-N1-C5.pep
REQLKRAKMAKDRKSRRKSSEAKKGKDPNAPKRPMSAYMLWLNASREKIKSDHPGISITDLSKKAGEIWKGMSKEKKEEWDRKAEDARREFPPRHSSSLSHSPWILCHLSNCSWWLPLP

SEQ ID NO: 31386 - protein, 313 aa, Glycine max
  unsure (1)..(313): unsure at all Xaa locations
  Clone ID: TF_GmC302_1.pep
MNVTNKPNPYGSTNGFQSLLQQNGWEQGSSRLRPTKLYPAPTARYQDIVRDANLFWGTLQAFHKTLGTKYKISTVGGTPLDLHRLLGDVTXREWEEVSLTFNVKDTIXSXSSMVRKSYLLMLLHYEQVYYFGIITLSNSTTIPEVAAVNDSPVQSSPVRAHDDMVSGTIDAKFDVGYVVTVTLGSEQLQGVLFHVPDNVSQSSHAEGTSSSQNLGDDTSNLQSRKRAKYAPRDPFRPKSNRSGYNFFFAENYARLKPSYHGQERAISKRIGFLWNNLSEAERQVYQEKGIRDKERYRTELMEYKSNNSTPNAQ

SEQ ID NO: 31387 - protein, 117 aa, Glycine max
  unsure (1)..(117): unsure at all Xaa locations
  Clone ID: TF_LIB3087-001-Q1-K1-E10.pep
MPKAKSDAKAADSRLKRKGAGAGRKQSKKAAKDPNKPKRPPSAFFVFMSEFREQFKKEHPNNKSVAVVGKAGGDKWKSLSDAFAFIXMFQEKAPFVATAEKKKQEYEKTILAYNKKL

SEQ ID NO: 31388 - protein, 165 aa, Glycine max
  Clone ID: TF_jC-gmst02400047f11a1.pep
MKGGKSKTESKRADAKLAVNKKGAVTKTRKPAGKGKAAKDPNKPKRPPSAFFVFMEEFRKVFNKEHPDNKAVSAVGKAAGAKWKTMSDAEKAPYVAKSENRKVEYEKNMRAYNKKQAESPTGGDEEESEKSVSDVNDEDDDDECSGQEEDTIEEWTVILHLVGLM

SEQ ID NO: 31389 - protein, 96 aa, Glycine max
  Clone ID: TF_LIB4128-120-Q1-K1-F9.pep
MKGGKSKTESKRADAKLAVNKKGAATKTRKPAGKGKAAKDPNKPKRPPSAFFVFMEEFRKVFNKEHPDNKAVSAVGKAAGAKWKTMSDAEKAPYVA

SEQ ID NO: 31390 - protein, 151 aa, Glycine max
  unsure (1)..(151): unsure at all Xaa locations
  Clone ID: TF_GmC43_4.pep
MKGGKSKTESKRADAKLAVNKKGAATKTRKPAGKGKAAKDPNKPKRPPSAFFVFXEFRKVFNKEHPDNKAVSAVGKAAGAKWKTMSDAEKAPYVAKSEKRKVEYEKNMRAYNKKQAEGPTGGDEEESEKSVSEVNDEDDDEEGSGEEEDDD

SEQ ID NO: 31391 - protein, 98 aa, Glycine max
  unsure (1)..(98): unsure at all Xaa locations
  Clone ID: TF_700559324H1.pep
FKDPNAPKRPPSAFFLFCSEYRPKIKGEHPGLSIGDVAKKLGEMWNNTAADDKQPYEKKAAKLKEKYEKDIAAYRAKGKXMQRKRGWSRLRRAKKKKR

SEQ ID NO: 31392 - protein, 152 aa, Glycine max
  Clone ID: TF_LIB5068-041-A1-XP1-A7.pep
MKGGKSKTESKRADPKLAVNKKGAATKARKPAGKGKAAKDPNKPKRPPSAFFVFMEEFRKVFNKEHPENKAVSAVGKAVVFKWNTMSDAEKAPYVAKSEKRKVEYEKNMRAYNKKQAEGPTAGDEEESEKPASDVHDEHDDEEGSGEETDDH

SEQ ID NO: 31393 - protein, 143 aa, Glycine max
  Clone ID: TF_uC-gmflLIB3275P091a02b1.pep
MKGGKSKTESKRADAKLAVNKKGAATKTRKPAGKGKAAKDPNKPKRPPSAIFVFMEEFRKVCNKEHPDNKAVSAVGKAAGAKWKTMSDAEKAPYVAKSEKRRVEYEKNMRAYNKKQAEGPTGGDERRSEKSVSEGNDEDDAEE

SEQ ID NO: 31394 - protein, 372 aa, Glycine max
  Clone ID: TF_GmC1739_1.pep
GPDSPSTQRPQILQKLKEWKPTMNLPVLKDNEEKKDKKKKGCSEKKRPSPPYILWMKDQWNEIKKANSEAEFKEISTMLGSKWKTVTAEEKKPYEEIYHAEKEAYLQMIAKEKRETEAMRLLEDEQKQKTAMELLEQYMQFKQEAEKDGKKNKKEKDPLKPKHPMSAYFLFTNDRRAALAAENKNFLEVPKITSEEWKNMTEEQKRPYEEMAKKNKEQYALEMEAYKQKKDEEAAHFMKEEEEQMKLQKQEALQLLKKKEKTENIIKKTKQNRQKKKQNKDDKNSDPNRPKKPASSFILFSKEARKTLQEERPGISTSTLNALVSLKWKELSEEDRQFWNGQASKAMDAYKKELEEYNKSLAATACQEQKTE

SEQ ID NO: 31395 - protein, 117 aa, Glycine max
  Clone ID: TF_uC-gmflminsoy075f12b1.pep
MKGGKSKTESKRADAKLAVNKKGAATKTRKPAGKGKAAKDPNKPKRPPSAFFVFMEEFRKVVNKEHPDNKAVCAVGKAAGAKWKTMSDAEKAAYVAKTEKRKVESEKNMRAYNKKQA

SEQ ID NO: 31396 - protein, 152 aa, Glycine max
  Clone ID: TF_GmC43_1.pep
MKGGKSKTESKRADPKLAVNKKGAATKARKPAGKGKAAKDPNKPKRPPSAFFVFMEEFRKVFNKEHPENKAVSAVGKAAGAKWKTMSDAEKAPYVAKSEKRKVEYEKNMRAYNKKQAEGPTGGDEEESEKSVSEVNDEDDDEEGSGEEEDDD

SEQ ID NO: 31397 - protein, 156 aa, Glycine max
  Clone ID: TF_GmC43_10.pep
MKGGKSKTESKRADPKLAVNKKGAATKARKPAGKGKAAKDPNKPKRPPSAFFVFMEEFRKVFNKEHPENKAVSAVGKAAGAKWKTMSDAEKAPYVAKSEKRKVEYEKNMRAYNKKQAEGPTGGDEEESEKSVSEVNDEDDDEEGSGEEEDDDYRMD

SEQ ID NO: 31398 - protein, 152 aa, Glycine max; identical to SEQ ID NO: 31396
  Clone ID: TF_GmC43_8.pep

SEQ ID NO: 31399 - protein, 147 aa, Glycine max
  unsure (1)..(147): unsure at all Xaa locations
  Clone ID: TF_LIB3242-426-P1-J1-E4.pep
MKGGKSXKTESKRADPKLAVNKKGAATKARKPAGKGKAAKDPNKPKRPPSAFFVFMEEFRKVFNKEHPENKAVSAVGKAAGAKWKTMSDAEKAPYVAKSEKRKVEYEKNMRAYNRKQAEGPTGGDEEESEKSVSEVNDEDDDEEGSG

SEQ ID NO: 31400 - protein, 141 aa, Glycine max
  Clone ID: TF_GmC2181_11.pep
KTTECFLRVPVCIFFALSFISLPWKNGMTYFVLCDSEEFRKTFKAENPLVKAVSVVGKAGGEKWKSLSSAEKAPYEAKAAKRKAEYEKLIKAYEKKQASSADDDESDKSKSEVNDEDDASGEEDHQEDEDDEEEEDDEDDD

SEQ ID NO: 31401 - protein, 152 aa, Glycine max
  Clone ID: TF_GmC43_6.pep
MKGGKSKTESKRADAKLAVNKKGAATKTRKPAGKGKAAKDPNKPKRPPSAFFVFMEEFRKVFNKEHPDNKAVSAVGKAAGAKWKTMSDAEKAPYVAKSEKRKVEYEKNMRAYNKKQAEGPTGGDEEESEKSVSEVNDEDDDEEGSGEEEDDD

SEQ ID NO: 31402 - protein, 152 aa, Glycine max
  unsure (1)..(152): unsure at all Xaa locations
  Clone ID: TF_10843327.pep
MKGGKSKTESKRADPKLAVNKKGAATKARKPAGKGKAAKDPNKPKRPPSAFFVFMEEFRKVFNKEHPENKAVSAVGTAAGAQWKTMSDAEKAPYVAESXERRVEYDENMRAYDKKQAECATWWDDEESENSVSDVNDKHDDKACTCYVEDDE

SEQ ID NO: 31403 - protein, 286 aa, Glycine max
  Clone ID: TF_GmC1795_1.pep
MGGTVVAEVPTKRGRGRRALKEKTPSTNDANIIIATPISPSSEKAAQVVPSKKKQDSKKQQSFEKELLEMQEMLQQMRLEKEKTEELLKVKDEALKLKEEELENRGREQEKLQTELKKLQKLKEFKPTMNLPVLKDNEEKKDKKKKGCSEKKRPSPPYILWMKDQWNEIKKANPEAEFKEISTMLGAKWKTVSAEEKKPYEGIYHAEKEAYLQVIAKEKRETEAMRLLEDEQKQRTAMELLEQYMQFKQEAGKDGQKNQKEKKQQAANDPLSPLFAFEKRETEAMR

SEQ ID NO: 31404 - protein, 640 aa, Glycine max
  Clone ID: TF_GmC2151_1.pep
MTDGHLFNNITLGGRGGTNPGQIKIYPGGIIWKRQGGGKLIEVDKSDIMGVTWMKVPRSNQLGVQIKDGLYYKFTGFRDQDVVSLTNFFQNTCGISVEEKQLSVSGRNWGEVDLNGNMLAFTVGSKQAFEVSLADVSQTQLQGKNDVILEFHVDDTTGANEKDSLMEISFHIPNSNTQFVGDENRPPAQVFRDKIMSMADVGAGGEDAIVTFEGIAILTPRGRYSVELHMSFLRLQGQANDFKIQYSSVVRLFLLPKSNQPHTFVIISLDPPIRKGQTLYPHIVMQFETDYVVESELAINEDLYNTKYKDKLDLSYKGLIHEVFTTILRGLSGAKVTKPGKFRSCQDGYAVKSSLKAEDGILYPLEKSFFFLPKPPTLILHEEIDYVEFERHAAGGSNMHYFDLLIRLKSEQEHLFRNIQRNEYHNLYEFISSKGLKILNLGDAQPTVGIKKVLENDDDDAVDPHLERIKNEAGGDESDEEDSDFVADKDDEGSPTDDSGADDSDATDSGDEKEKPAKKESKKDLPSKASTSKKKSKDDEDGKKRKQKKRKDPNAPKRAMSGFMFFSKLERENLKKTNPGISFTDVSRVLGEKWKKLSVEEKEPYEAKAREDKKRYKDEISGYKNPQPMNIDSGNESDSA

SEQ ID NO: 31405 - protein, 93 aa, Glycine max
  Clone ID: TF_LIB3108-006-Q1-K1-F10.pep
MKGVKPRNRTVKPDDKLGAKRKGADKVSRQVKRAKAGKDPNAPKRPPTAFFIFMDDFRKEFKEKNPNNKSVDTVSKAGRDKWKSMSDAEKAPY

SEQ ID NO: 31406 - protein, 80 aa, Glycine max
  Clone ID: TF_LIB3242-726-P1-J1-G4.pep
SGFMFFSKLERENLKKTNPGISFTDVGRVLGEKWKKLSAEEKDPYEAKAREDKKRYMDEISGYKNPQPMNIDSGNESDSA

SEQ ID NO: 31407 - protein, 120 aa, Glycine max
  unsure (1)..(120): unsure at all Xaa locations
  Clone ID: TF_LIB3065-016-Q1-N1-B7.pep
MKGGKFKTESKRAHAKLAVNKKGAVTKTRKPPGKGKASKDPNKPKRPPSAFFVFMEEFRKVFNTEHSYNKAASAVGKAAGAXWKTMSDAEKAPYVAKSEKRKVEYEKNMIAYNTKHAEGP

SEQ ID NO: 31408 - protein, 209 aa, Glycine max
  unsure (1)..(209): unsure at all Xaa locations
  Clone ID: TF_GmC1637_1.pep
MASSQSRKRVDAVDSRAASVLVRAKDGSAFARCDDCKKNVPVALIDMHSCSLEAKIKMNLDAQVVEQAAEAKKPERKKPKSKEPXQKKAKVGKGKKVKDPNMPKRPPTAFFVFLDDFRKSFKEANPDSKDVKRVGKEAGEKWRSMTDEEKKPYLDKVAELKEEYEKAMESYEAGQDEEDQTVSDKETSDKEAAAKEVAIEVEEELTDED

SEQ ID NO: 31409 - protein, 149 aa, Glycine max
  unsure (1)..(149): unsure at all Xaa locations
  Clone ID: TF_uC-gmroLIB3258016f05a1.pep
KVLPPNDFGANVSDGSDSGDEKKKPAKKESKKVLPFKASTSKKKSKDDEDGKKKKQKKKKDPNAPKRAMSGFMFFSKLERENLKKTNPGISFTDAGRVLGEKWKKLSAEEKEPYEAKAREDKKRYKDEISGXKNPQHMNIDSGNESDSS

SEQ ID NO: 31410 - protein, 102 aa, Glycine max
  Clone ID: TF_GmC9778_5.pep
KRRKHLEASLALRFDVSRGIQPQYFKSAFVGYTVGLVLTIVVMNWFQAAQPALLYIVPSVIGFLAAHCLWNGDVKQLLEFDESKTANSPQESDDDKSSKKVE

SEQ ID NO: 31411 - protein, 121 aa, Glycine max
  unsure (1)..(121): unsure at all Xaa locations
  Clone ID: TF_LIB3108-030-Q1-K1-H7.pep
TADAKLAVNKKGAVTKTRKPAGKGKAAKDPNTPKRPPSAIFDLMEEFRKVFNIEHPDNKAVSAVGKAAGAKWXTMFDAETAPYVAKSEKRKVEYEKNMRAYNRNHAXGTTGEDEEESDTFA

SEQ ID NO: 31412 - protein, 129 aa, Glycine max
  Clone ID: TF_8285483.pep
KGGKTKTESNRANPKLAVNKRGTATKARKPAGKGKAAKDPSKPKRPASAVFDFIEEFRKVFSKEHPENKAVCAVGKSARTKWKTMSDAEKAPYVAESEKRKVEFEKSIRAYIKKQAEGPTGGDEEDSEK

SEQ ID NO: 31413 - protein, 445 aa, Glycine max
  unsure (1)..(445): unsure at all Xaa locations
  Clone ID: TF_GmC2151_2.pep
MSMADVGAGGEDAIVTFEGIAILTPRGRYSVELHMSFLRLQGQANDFKIQYSSVVRLFLLPKSNQPHTFVIISLDPPIRKGQTLYPHIVMQFETDYVVESELAINEDLYNTKFKDKLELSYKGLIHEVFTTILRGLSGAKVTKPGKFRSCQDGYAVKSSLKAEDGILYPLEKSFFFLPKPPTLILHEEIDYVEFERHAAGGSNMHYFDLLIRLKSEQEHLFXNIQRNEYHNLYEFISSKGLKIMNLGDAQPTVGIKKVLENDDDDAVDPHLERIXNEAGEDESDEEDSDFVADKDDEGSPTDDSGADDSDATDSGDEKEKPAKKESKKDLPSKASTSKKKSKDDEDGKKKKQKKKKDPNAPKRAMSGFMFFSKLERENLKKTNPGISFTDVGRVLGEKWKKLSAEEKEPYEAKAREDKKRYMDEISGYKNPQPMNIDSGNESDSA

SEQ ID NO: 31414 - protein, 73 aa, Glycine max
  Clone ID: TF_13477705.pep
MCAFYYIVVFYSIYFAMNFRLAVNKKGAATKARKPAGKGKAAKDPNKPKRPPSAFFVFMEEFRKVFNKEHPEN

SEQ ID NO: 31415 - protein, 121 aa, Glycine max
  Clone ID: TF_LIB3039-016-Q1-E1-A3.pep
VFISILNLSLFSLNQYPTSRPCSPLVSVIERGKSKTESKRADPKLAVNKKGAAIKARIPAGKGKAAKDPNKPKRPPSAFFVFMEEFRKVFIKEHPENNAVSAVGKAAGAKWKTMSDAEKAP

SEQ ID NO: 31416 - protein, 133 aa, Glycine max
  unsure (1)..(133): unsure at all Xaa locations
  Clone ID: TF_LIB3242-344-Q1-J1-E3.pep
MKGGKSKTESKRVDAKFVVNKKGAVTKTRKFAGKGKAAKDPNKPKRPPSVFFVFMEEFRKVFNKEHPDNKAVFVVGKAAGAKWKTMSDAEKAPYVAKSEKRKVEYEKNMRVYNKKQAEGLTGXDEEEFEKSVS

SEQ ID NO: 31417 - protein, 101 aa, Glycine max
  unsure (1)..(101): unsure at all Xaa locations
  Clone ID: TF_LIB3106-038-Q1-K1-C6.pep
MKGGTSKTESKRADPKLAVNKKGAATKARKPAGKGKAAKDPNKPKRPPSAFFVFMEEFXNVFNKEHPENXAVSAVGKAAGAQWKTMSDAEKTPYVAQSEKR

SEQ ID NO: 31418 - protein, 103 aa, Glycine max
  unsure (1)..(103): unsure at all Xaa locations
  Clone ID: TF_LIB3242-707-P1-K1-B4.pep
SKTAEPELAVNNKGAYTYAKQLDEKGKAPXDANKPNRPSSAFYGFMDEFRKVFNKQHPEHKSLSAWSKLLRAKLDTMSDAEKAPYVAKCVNRKVVYQMNMTAY

SEQ ID NO: 31419 - protein, 115 aa, Glycine max
  Clone ID: TF_LIB3242-762-P1-J1-A1.pep
MKGGKSKTESKRADPKLAVNNKGAATKARKPAGKGKAVKDPNKPKRPPSAFFVFMEEFRKVFNKEHSANKAVSVVGKAAGAKWKTMSDAEKAPYVANSEKRKVVYQKNMRAYNKK

SEQ ID NO: 31420 - protein, 163 aa, Glycine max
  Clone ID: TF_GmC2181_34.pep
MKTAKGKGAARPSKESLKPVDDRKVGKRKASGKPEKSRAPKKEKKAKKDPNKPKRPPSAFFVFLEEFRKTFKAENPLVKAVSVVGKAGGEKWKSLSSAEKAPYEAKAAKRKAEYEKLIKAYEKKQASSADDDESDKSKSEVNDEDDASGEEDHQEDEDDEEGE

SEQ ID NO: 31421 - protein, 169 aa, Glycine max
  Clone ID: TF_GmC2181_40.pep
MKTAKGKGAARPSKESLKPVDDRKVGKRKASGKPEKSRAPKKEKKAKKDPNKPKRPPSAFFVFLEEFRKTFKAENPLVKAVSVVGKAGGEKWKSLSSAEKAPYEAKAAKRKAEYEKLIKAYEKKQASSADDDESDKSKSEVNDEDDASGEEDHQEDEDDEEEEDDEDDD

SEQ ID NO: 31422 - protein, 119 aa, Glycine max
  Clone ID: TF_16347117.pep
KGGKSKTESKRADAKLAVNKKGAATKTRKPAGKGKAVKDPNKPKRPPRAFFVFMEEFRKVFNKEHPDNKAVSAVAKAAGAKWKTMSDAEKAPYVGHSRKRKVEHQKNLRAYYMKQAGRP

SEQ ID NO: 31423 - protein, 151 aa, Glycine max
  unsure (1)..(151): unsure at all Xaa locations
  Clone ID: TF_10232396.pep
KGGKSKTXSKRADAPLAVNXMGSDTKTRKPARKGKAAKDPNKPKMPPSAFFVFMEEFKKVSNKEHPDNKPVSAVGKSAGAKWKTMSDAEKAPYVAESEKRKVDYEKNMRAYNKKQAEGPTGGDEEESEKSVSEVNDDDDDDECIGEDDDDD

SEQ ID NO: 31424 - protein, 96 aa, Glycine max
  unsure (1)..(96): unsure at all Xaa locations
  Clone ID: TF_LIB3242-711-P1-K1-H1.pep
MPKAKYDAKAVDXRMKRKGAGAGRKQSKKAAKDPNKPKRPPSAFFDFMSEFREQYKKEHTNNKFSGVVSKAGGDKWKWLSEAEKALFVATVERRNK

SEQ ID NO: 31425 - protein, 142 aa, Glycine max
  Clone ID: TF_GmC11_1.pep
MPKAKSDAKAADSRLKRKGAGAGRKQSKKAAKDPNKPKRPPSAFFVFMSEFREQFKKEHPNNKSVAVVGKAGGDKWKSLSDAEKAPFVATAEKKKQEYEKTILAYNKKLEGKNSEEDESDKSKSEVNDDEEDEEEEDDDDDE

SEQ ID NO: 31426 - protein, 141 aa, Glycine max
  Clone ID: TF_GmC11_2.pep
MPKAKSDAKAADSRLKRKGAGAGRKQSRKAAKDPNKPKRPPSAFFVFMSEFREQFKKEHPNNKSVAVVGKAGGEKWKSLSDAEKAPFVATAEKKKQEYEKTISAYNKQLEGKNSEEDESDKSKSEVNDDEEDEEEDDDDDE

SEQ ID NO: 31427 - protein, 149 aa, Glycine max
  unsure (1)..(149): unsure at all Xaa locations
  Clone ID: TF_10844802.pep
KRGKFNTDSNRAYPKLAVNNKGAGTKARIPAGNGKAVKDPNKPNRPASAIFVLMEEFRNVFNKXHPENKALSAVGKAAGAKWKTMSDAEKAPYVAXSEKRKVEYEKNMRAYNKKQAECPTGGDEEXSEKSVSDVNDEHDDEQSDGEEED

SEQ ID NO: 31428 - protein, 150 aa, Glycine max
  Clone ID: TF_GmC34041_1.pep
MAKKAKGSHSASSASASSSSDKLVLRIKSNEGTKRSVRQTNSRKKLKAKQKKNKQKFDAMKPRKPPTAFFYFLEDFRKEFQEQNPDVKSMRDIGKACGEKWKTMTYEEKVQYYDIATKKREEFDSAMAEFNKKMENGEFDETDDESEFDE

SEQ ID NO: 31429 - protein, 200 aa, Glycine max
  Clone ID: TF_GmC1637_2.pep
MASSQSKKRVDAVDSRAASVLLRAKDGSAFARCDDCKKNVPVALIDMHSCSLEAKIKMNLDAQVVEQAAEAKKPERKKPKSKEPMAKKAKVEKVKKVKDPNMPKRPPTAFFAFLDDFRKSFKEANPDSKDVKRVGKEAGEKWRSMTDEKKKPYLDKVAELKAEYEKAMESYEAGQDEEDQAGSDKEAAAKEVEEELTDEE

SEQ ID NO: 31430 - protein, 166 aa, Glycine max
  Clone ID: TF_GmC2181_47.pep
MKNAKGKGAARASKESLKPVDDRKVGKRKASGKPGRSSAPKKEKKAKKDPNKPKRPPSAFFVFLEEFRKTFKAENPNVKAVSVVGKAGGEKWKSLSSAEKAPYEAKAAKRKAEYEKLIKAYDKKQASSADDEESDKSKSEVNDEDDASGEEEEEDDEEEEDDEDDD

SEQ ID NO: 31431 - protein, 80 aa, Glycine max
  Clone ID: TF_LIB3040-017-Q1-E1-G12.pep
MTRGKSKTESKTADCKLAVNNKGAANNAKKLAGNGNAAKDANKRKRPPSAFFVFMEEFTNVFNKEHPENKSVSAVGKTAG

SEQ ID NO: 31432 - protein, 106 aa, Glycine max
  unsure (1)..(106): unsure at all Xaa locations
  Clone ID: TF_11689089.pep
TDFKRTDPKLAANMSGASTNARKPAGKGKAAKDPNKPKKPSNAFFVFMEEFRKVFNKEHPENKAVSAVGKAAGAKWKTMSDAEKAPYVAKSEXRKVEYEKNMTAYN

SEQ ID NO: 31433 - protein, 128 aa, Glycine max
  Clone ID: TF_uC-gmflLIB3275P072h03b1.pep
ALRFWKPAGKGKAAKDPNKPKRPPSAFYDFMEEFRKVFNKEHSENKAGSAGGKAAGAKWKTMSDAEKAPYVAKSEKRKVEYEKNMRAYNKKQAEGPTGGDEEKPEKPVSEVNDEDDDEEGSGEEEDDQ

SEQ ID NO: 31434 - protein, 156 aa, Glycine max
  unsure (1)..(156): unsure at all Xaa locations
  Clone ID: TF_LIB4391-014-R1-K1-E6.pep
MKGGKSKTESKRADPKLAVNKKGAATKARKPAGKGKAAKDPNKPKRPPSAFFVFMEEFRKVFNKEHPENKAVSAVGKAAGAKWKTMSDAEKAPYVAKXSEKREVEYEKNMRAYNKKQAXEGPTGGDEXEESEKSVSEVNDEDDDEXEASGEEKDDD

SEQ ID NO: 31435 - protein, 124 aa, Glycine max
  Clone ID: TF_4260356.pep
KGGKFKTESKRADAKLAVNKKGAATKTRKPAGKGKAAKDPNKPKRPSSAFFVFMEEFRKVFNKEHPDNKAVSAVGKAAGAKWKTMSDAEKAPYVAKSEKRKVEYEKNIRAYNKKQAEGPTGGDE

SEQ ID NO: 31436 - protein, 129 aa, Glycine max
  Clone ID: TF_7146626.pep
KGGKSKTESKRADAKLAVNKKGAATKTRKPAGKGKAAKDPIEPKRPPRAFFVIMEEFRKVCNKEHPDNKAESAVGKAAGAKWKTMSDAEKAPYVAKSETTRVEYEKIMIAHNKKQAERPTSGDEEESEK

SEQ ID NO: 31437 - protein, 141 aa, Glycine max
  Clone ID: TF_20075468.pep
HKKKYPTENVQVTEITKKCSEKWKTMSDDEKRRFYELAQKDAERYQAEVAAYGGDDVTKKRKITKKDPNAPKRALSAFFFFSNEERPEVQRQHPEWKVGQVAQELGKFWKNLPDEEKAIYENKATEDQERYAQEMKTYRGE

SEQ ID NO: 31438 - protein, 140 aa, Glycine max
  Clone ID: TF_7147175.pep
HQAKLAVNKKGAATKTRKPAGKGKAAKDPNKPKRPPSAFFVFMEEFRKVFNKEHPDNKAVSAVGKAAGAKWKTMSDAEKAPYVAKSEKRKVEYEKNMRAYNKKQAEGPTGGDEEESEKSVSEVNDEDDDEEGSGEEEDDD

SEQ ID NO: 31439 - protein, 152 aa, Glycine max; identical to SEQ ID NO: 31401
  Clone ID: TF_GmC43_2.pep

SEQ ID NO: 31440 - protein, 152 aa, Glycine max; identical to SEQ ID NO: 31401
  Clone ID: TF_GmC43_7.pep

SEQ ID NO: 31441 - protein, 388 aa, Glycine max
  unsure (1)..(388): unsure at all Xaa locations
  Clone ID: TF_GmC1089_1.pep
MEEYTNNNHLSENTGPSPSTPRPNFLYSSASGGNHNHQHQHHSHHHHHHHQFPINTFHLQSGGSDHCFQSDQVSPHPSVKSEASTSQLHAPIFHYPLMRGNLHNTMHHHHPQQQQGGSPTSSTGEVEAIKAKIIAHPQYSNLLEAYMFNLXIGAPPEVVARMAAAKQEFEARQRSSVGSRETSKDPELDQFMEAYYDMLVKYREELTRPIQEAMDFMRRIETQLNMLCNGPVRIFSDDKCEGAGSSEEDQDNSGGETELPEIDPRAEDRELKNHLLKKYSGYLSSLKQELSKKKKKGKLPKDARQKLLNWWELHYKWPYPSESEKVALAESTGLDQKQINNWFINQRKRHWKPSEDMQFMVMDGLHPQSATLYMDGHYMADGHYRLGP

SEQ ID NO: 31442 - protein, 58 aa, Glycine max
  Clone ID: TF_LIB3242-137-Q1-J1-H8.pep
PRQVAIWFQNRRARWKSKRIEQEYRKLKDEYDNLASRFESLKKEKDSLQLEVISFWFF

SEQ ID NO: 31443 - protein, 379 aa, Glycine max
  Clone ID: TF_GmC1144_1.pep
MEGGSSSSNGTSYLLAFGENNSGGLCPMTMMPLVTSHHAGHHPINPSNNNNVNTNCLFIPNCSNSTGTPSIMLHINHNNNKTEDDDNNNNSGVGYYFLELVHHQHHEGNNTNRGRSSSASSSAAKAKIMSQPHYHRLLAAYVNCQKVGAPPEVVARLEEACASAATMAGGDAAAGSSCIGEDPALDQFMEAYCEMLTKYEQELSKPLKEAMLFLQRIECQFKNLTISSSDFASNEGGDRNGSSEEDVDLHNMIDPQAEDRDLKGQLLRKYSGYLGSLKQEFMKKRKKGKLPKEARQQLLEWWNRHYKWPYPSESQKLALAESTGLDQKQINNWFINQRKRHWKPSEDMQFVVMDPSHPHYYMDNVLGNPFPMDLSHPML

SEQ ID NO: 31444 - protein, 149 aa, Glycine max
  Clone ID: TF_LIB4390-053-R1-K1-H4.pep
SASNEGGDRNGSSEEDVDLHNMIDPQAEDRDLKGQLLRKYSGYLGSLKQEFIKKRKKGKLPKEARQQLLEWWNRHYKWPYPSESQKLALAESTGLDQKQINNWFINQRKRHWKPSEDMQFVVMDPSHPHYYMDNVLGNPFPMDLSHPML

SEQ ID NO: 31445 - protein, 365 aa, Glycine max
  Clone ID: TF_GmC1144_2.pep
SSRIGSSGENSGGLCPMTMMPLVTSHHATNPSNPSNNTNNNENTNCLFIPNCSNSSGTPSIMLHNNNTDDDNNKTSTNTGLGYYFMESDHHHRNNNNNGSSSSSSSSAVKAKIMAHPHYHRLLAAYVNCQKVGAPPEVVARLEEACASAVTMAGDAAAAAGSSCIGEDPALDQFMEAYCEMLTKYEQELSKPLKEAMLFLQRIECQFKNLTISSTDFACNEGAERNGSSEEDVDLHNMIDPQAEDRELKGQLLRKYSGYLGSLKQEFMKKRKKGKLPKEARQQLLEWWSRHYKWPYPSESQKLALAESTGLDQKQINNWFINQRKRHWKPSEDMQFVVMDPSHPHYYMDNVLGNPFPMDLSHPML

SEQ ID NO: 31446 - protein, 245 aa, Glycine max
  Clone ID: TF_GmC1144_3.pep
IRLELLAAYVNCQKVGAPPEVVGRLEEACASAAVIMAGGTASIGEDPALDQFMEAYCEMLIKYEQELSKPFKEAMLFLQRIECQFKSLTISSSLDTTACNEAIDRNGPSEDVDVQTNIIDPQAEDQELKGQLLRKYRGYLGSLKQEFTKKRKKGKLPKEARQQLLEWWSRHYKWPYPSESQKLALAESTGLDQKQINNWFINQRKRHWKPSEDMQFVVVDPSHPHYYMENVLGNPFPMDLSHPML

SEQ ID NO: 31447 - protein, 195 aa, Glycine max
  Clone ID: TF_GmC1293_2.pep
VDKHILARQTGLSRSQVSNWFINARVRLWKPMVEEMYLEEEKEHQNDVASSEGGGINILGDQKPTQARLVRIDSECMSSIVNNPDDKNDTKSGKTIQNDNQMDAFGSVELDFWSYTHQYSSGHSGGVSLTLGLQQHGESGVSLAFPPAATQSSMFYPRDQIEDCQTVQYSLVDGKGQNMPYRNLMGTHLLHDHLV

SEQ ID NO: 31448 - protein, 187 aa, Glycine max
  Clone ID: TF_GmC262110_1.pep
DELMLAKQTGLSRNQVSNWFINARVRLWKPMVEEIHMLESQQGQKRSHWEERSKKNLSDHLPSDHNSVVFENPSTSMEKFHDAPYKHPRNELANKQVRSQEQLNQTNTGNQQVMGVGVSNNGVSLTLGLHQNHHGIGLFEPFGMSAAQRFGVALQPEGYVLSSFESQNRHFGKDVIGGGQLLHDFAC

SEQ ID NO: 31449 - protein, 223 aa, Glycine max
  unsure (1)..(223): unsure at all Xaa locations
  Clone ID: TF_GmC1478_1.pep
MAFPPPHGFTFNTTHEEDHHHLPPTSLNPFPSLPPQHFQGGASFMLKRSMSFSGIENKCDEVLHGDDELSDDGIFPCGGFTFNTTHEEEHGHYPPTDLGALLALPPQLLQGGALGLQPRQVAIWFQNRRXARWKTKHLEKEYEVLKKQFEAVKADNDVLKVENQKLQAELQAVKSRDWCEAGMMSHKKETEGSWSNGSDNSLEINLDHSRTLGLNSPISSQKG

SEQ ID NO: 31450 - protein, 447 aa, Glycine max
  Clone ID: TF_GmC309_2.pep
GSSNNVLNSQYLKAAQELLDEIVNVRKALKQTGLEKQQSFRDIGLDGSKDSDGKSTSQSVQISSGPNGSAANSSCELSPAERQNLLDKKTKLLSMLDEVDKRYRQYCHQMQIVVSSFDMVAGCGAAEPYTALALRTISRHFRCLRDAISGQIQVTQRNLGEQEGIPRLRYVDQQLRQQKALQQLGVMRQAWRPQRGLPETSVSVLRAWLFEHFLHPYPKDSEKIMLARQTGLTRNQVANWFINARVRLWKPMVEEMYKEEFGDSEMSSNLLSSEKTLKAPRDDVQASDNKREESQDNLINVDDSVQHHGLKLDHASELDRGIQSSDHGENAMDPRIGKLQGDQRFNMNNSNNNSPYYGDGCIMASTPATYDLPELGNIAVDGHVSLALELRNCESQGFGVSNDDMHKRHKKTLASSPETDLLDYHFTDPGKQQNKFGNPHLLHEFVV

SEQ ID NO: 31451 - protein, 150 aa, Glycine max
  unsure (1)..(150): unsure at all Xaa locations
  Clone ID: TF_GmC320602_1.pep
EESFKEHTTLNXXQKLAXAKQLNLXXRQVEVWFQNRRARTKLKQTEVDCEYLKRCCETLTEENRRLQKELQELRALKSSQPFYMQLPATTLTMCPSCERVATNSTTTNQTSIVNNNASSQIPVELSLSKPRILPFPNGQVQAQAHQIASS

SEQ ID NO: 31452 - protein, 141 aa, Glycine max
  Clone ID: TF_LIB3094-027-Q1-K1-C10-F3A.pep
LMRSFFLYFLCIGVFIFFLGQFCYVLMFFLVFRIFFFVLYLKFCFCFFFFFICFCVYFLCVFVFFSCIFFCSFFFRFFTFVFFFWLFCMCLFFLFVFFLAGFFFFGFFFLSCVFFLFFFYILFFLLFCVFVFFSLFSFFFF

SEQ ID NO: 31453 - protein, 311 aa, Glycine max
  Clone ID: TF_GmC1350_1.pep
MDMMNMETNNRKFLSLPLSNNNNNSGNAQMRSSSDNRRVPVTSNSNIAQEHHYSHHNPTDTCSVRDKIMAHPFFPRLLSSYLNCLKVGAPPEVVASLEESCAKCESFNASSGRTGGSIGEDPALDQFMEAYCEMLIKYEQELTKPFKEAMLFFSRIECQLKALAVSSDFGQSETSSQNEVDVHENNLDSQAEDRELKVQLLRKYSGYLGSLKKEFLKKKKNGKLPKEARQQLLDWWNRHYKWPYPSESQKQALAESTGLDLKQINNWFINQRKRHWKPSEDMQFAVMDATNYYMENVMCKPFPMDGMPMLL

SEQ ID NO: 31454 - protein, 204 aa, Glycine max
  Clone ID: TF_GmC419_152.pep
MAFESHYVLLLCSFKEQLQQHVRVHAMEAVMACWDIEQSLQSLTGVSPGEGTGATMSDDEDDQVDSDANLFDSSFDGADGMGFGPLVPTESERSLMERVRQELKHELKQGYKEKIVDIREEILRKRRAGKLPGDTTSVLKAWWQSHSKSPYPTEEDKARLVQETGLQLKQINNWFINQRKRNWHSNPSTSTVLKSKRKRYSHQN

SEQ ID NO: 31455 - protein, 327 aa, Glycine max
  Clone ID: TF_GmC1549_1.pep
FLFLLLLTMLDEVYRRYRQYYQQMQAVVTSFEYVSGLSNAAPYASLAIKAMSKHFRCLKNAITDQIQFANKAHFHISNRKDESPRFGNSDRGPYGQRPGFLEHQPVWRPQRGLPERAVTVLRAWLFEHFLHPYPTDTDKLMLAKQTGLSRSQVSNWFINARVRLWKPMVEEIHMLETRQAPKNLQKEEHCTNKPSDHLPSDNSIVSENPSTSTDKFQEAPYKRAINELPNIPVRTQEQLNLPCTSNQPGGVGVSMGGSASNSVSLTLGLYQNHGIGLAEPFPLNAAQRFGVALETNNEGYVMSDYESQNRHFGRDVIGGQLLHDFVG

SEQ ID NO: 31456 - protein, 140 aa, Glycine max
  Clone ID: TF_GmC1814_1.pep
RKLFQDLPKISSGLSQLSLFDRDSRQSRMSLQQLGVIRSQRQVWRPIRGLPETSVAILRSWLFEHFLHPYPNDSEKLMLASQTGLTKNQVSNWFINARVRLWKPMIEEMYKEEFGEFSEDSNPAGNNYLTREDTTDCVED

SEQ ID NO: 31457 - protein, 187 aa, Glycine max
  Clone ID: TF_GmC444_1.pep
MYFFHLQMKMQLARALGLQPRQIAIWFQNRRARWKTKQLEKDYDVLKRQYEAIKADNDALQFQNQKLQTEILALKSREPTESINLNKETEGSSSNRSENSSEIKLDISRTPAIDSPLSTQQNNNNRTLFPSSARPTGVAQLFQTTPRPEIQCQKIDHMVKEESLSNMFCGIDDQSGLWPWLEQQHFN

SEQ ID NO: 31458 - protein, 272 aa, Glycine max
  Clone ID: TF_GmC969_1.pep
FGTRQRWLPESSVVILRAWLFEHFLHPYPKDSDKIMLAKQTGLTRSQVSNWFINARVRLWKPMIEEMYKQDNCIAGMDSNSSSENVSKVTKSYVKTSNDVGDDSQHCQSPIVADTNHSGGQAKDLRHDQALDTEMMASIGLASPITSIYGAETEHRRNLDDCGLFSNDTVVQSDGATNKRFVSVGPTCQMPESERFKSGSGVSLTLGLQHCEGGNFLPGKTHLSLVSMREDDISKATAASTVGVETTELECIGAGNQQQRLNSPHMLHDFEV

SEQ ID NO: 31459 - protein, 461 aa, Glycine max
  Clone ID: TF_GmC2043_2.pep
RAGSSCGGGENNNNNDGGKQGVELSTAQRQELQMKKSKLVTMLDEVEQRDRQYHHQMQVVITSFEQAAGVGAAKSYTALALKTISKQFRCLKDAISSQIKTTSKTLGEDNCLGVKVEGSRLRYVDHQQRQQRALQLGMIQHNAWRPQRGLPERAVSVLRAWLFEHFLHPYPKDSDKVMLAKQTGLTRSQVSNWFINARVRLWKPMVEEMYLEEVKQEPNNSSQDNNNTKGSNESSKELWSEANAAAQESGAMRFDQINILQSKAESFKNNQTTSPTEISNSNSLQSGFHLADMQSPNKPKSTSEMHQNSPGSILSVDMEMKPHHHGETNNITREGQNNNTTTKFGIESHGGGFGAFPNMEDIGRFHHHVTEQLAPRFHGNGVSLTLGLPHSTENNLSLSGTTQHGFLSQNMHLGMRNSENDEFCGAINTTPPSSHSGISYESIDIQNRKRFAAQLLRDFVA

SEQ ID NO: 31460 - protein, 459 aa, Glycine max
  unsure (1)..(459): unsure at all Xaa locations
  Clone ID: TF_GmC309_1.pep
MCLKEDPSDLPRYSYSILNSLYLNTAQKMLDEICTVRKALKXRLKEKQENTGLDGSKDSDGKSTSQSMQMSSGPNGSTANASSELSSAERQNLLDKKTKLLSMLDEVDKRYRQYCHQMQIVVSSFDMVAGCGAAEPYTTLALRTISRHFRCLRDAISGQIQVTQRSLGEQEGIPRLRYVDQQLRQQKALQQLGVMRQAWRPQRGLPESSVSILRAWLFEHFLHPYPKDSEKIMLARQTGLTRNQVANWFINARVRLWKPMVEEMYKEEFGDSEMNCNLSSENNTVKCKKDDLVQESDNINNNNKWEETQDNLVTVDSVQVQPQAELDRGVNVENVVMDSGTGKLQGDQNQQRLGMNNNNNFYSISTNQNDGGLMGCSTHATYDLSELGNFTVGSHVSLALELRNCESDGFAMSDDAIRKRRNQALASSPETDLLDYHFTDSGKQQHRFGNPHLLHEFVV

SEQ ID NO: 31461 - protein, 489 aa, Glycine max
  Clone ID: TF_GmC2043_1.pep
NSARARAGSSCGGGENNNNNDGGKQGVELSTAQRQELQMKKSKLVTMLDEVEQRYRQYHHQMQVVITSFEQAAGVGAAKSYTALALKTISKQFRCLKDAISSQIKTTSKTLGEDDCLGVKVEGSRLRYVDHQLRQQRALQQLGMRTRGRTRGQRGLPERAVSVLRAWLFEHFLHPYPKDSDKVMLAKQTGLTRSQVSNWFINARVRLWKPMVEEMYLEEVKQEPNNSSQDNTTKRSKESSKELWSEANATAQESGAMRLDHINILQSKAESFNNNNNNQTTSPTEISNNSHNSLQSAGFHLADMQSPNKPIRSTSEMQNSPGSILSVDMEMKPRHHGETNNNTIITREGNNNTTKFGIESHGGGGGGFGAFPNMEDIGRFHHHHHHVTDQQSLAPRFHGNGVSLTLGLPHSTENNNNLSLSGTTHQHGFLSQNMHLGMRSTTNNANNEFCGAINTTPPSNSHSGTSYESIDIIQNRKRFAAQLLRDFVA

SEQ ID NO: 31462 - protein, 654 aa, Glycine max
  Clone ID: TF_GmC3921_3.pep
LEQQQIRRDKVRFEAAPLVGIEEEEPVYETAGMLSEMFNFPPATELLEQQHATATFRAARQAGEWYGNRQQQQQISGINADSAAAMQLFLMNPQTRSPSPPQTHATPSSTLHMLLPNPSSNSSLQGFTGSAAGGSFGQFTWVPESAHQQGGVVEGQGLSLSLSSSLEAAKAEELRMGDSGFLYYNHQQGGGGGGGSSSSSADQFQYKNNNNNHHQALHLQGAMGHDNNHQGHVGFGSSSVGVVNVLRNSKYAMAAQELLEEFCSVGRGQFKKSKFNRQNSNPNSNAGGGASPSSKDAPPPPPLSAADRIEHQRRKVKLLSMLDEVDRRYNHYCEQMQMVVNSFDLMMGFGAAGPYTALAQKAMSRHFRCLKEAITAQLKQSCEVLGDKDGAGSSGGLTKGETPMLKMLEQSLRQQRAFHQMGMMEQEAWRPQRGLPERSVNILRAWLFEHFLHPYPSDADKHLLARQTGLSRNQVSNWFINARVRLWKPMVEDMYQQELKEAEGAEEEREGNQSSSNNSGHQLAQTPTPSTTASTATAPPPPTTTPPTGKRSDSESDPSLAPINNTTSTAAMTVTASEVTQLSELPRTMVADESCRHGSLVATEFGTASAASEIGSTLIRFGTTAGDVSLTLGLRHAGNMPEKTPFSVRDFGGI

SEQ ID NO: 31463 - protein, 374 aa, Glycine max
  Clone ID: TF_GmC3921_5.pep
IEHQRRKVKLLSMLDEVDRRYNHYCEQMQMVVNSFDLMMGFGAAVPYTALAQKAMSRHFRCLKEAITAQLKQSCEVLGDKDGAGSSGGLTKGETPRLKMLEQSLRQQRAFHQMGMMEQEAWRPQRGLPERSVNILRAWLFEHFLHPYPSDADKHLLARQTGLSRNQVSNWFINARVRLWKPMVEEMYQQELKEAESAEEREKDQSNNISGNQAQIPTTPSAATTSTATATAPPPPPSTTTKTTKPTGKRSDTINAPESDPSQHLAMNNRQGFSENQAKKSTASTTTTTIASEVAPPVSQCFDDSDLPAHRLMASDDTCHLVTADFGTASASADIGSTLIRFGTTPGDVSLTLGLRHAGNMPEKSPFSVRDFGAI

SEQ ID NO: 31464 - protein, 869 aa, Glycine max
  unsure (1)..(869): unsure at all Xaa locations
  Clone ID: TF_GM240G09rgnA1.C1.o3.ma.pep
MFLIINRWEVGDNARCKNHRLFICGNSAYGAERWVMTLERMCERSPDGRRNIMHLTHSMVKMFCGNLDMKDDKNFPHLTRMNNGGTRIFKECTHPNEVRRRQIGEELGLDPEQVKFWFQNKKTHIRTINERLDTDALRLENERIQSENNKMRETLENLSCGSCGGRAMEPVKHQLSLQVLRGENILLTKECERITSLMANNGININPALLPVLPSSSSHDALGGSLLNQPVGIPAHNQFISNHDNHYIPAAIPTPFQDNPIVSPPSHNQDINPAPTIDQHIPTLDDPTLIGDNSPLISSFDYNIPALVTALDRNLPAMIHPHDQNNSIPSAEKEIHQVSNNSNNNLSALELDAVQILNNDMLPQPMKSLSKDMDSVQMLKIAEDAMEELMKLLSLNEPFWFRSLLDGKFNLRHDCYKRIFGRSNCLSGPHVRMESSKDSRVVKMSGAQLVEMFLNSDKWVDLFPTIVKKAQTIQVLESGSSGNRNGALQLVNAEMHILSHLVPSREFLFLRYCKQIEVGIWAIGDVSIDSSTYKTTVSHARRLPSGCLIQEKSSEGLCMVSWMEHVEVNEKMQTHNLFRDTICGNNAYGADRWVMTLERMCERFASYSAKTIPSCETGGGWLLFIFFARSKVILILIYLIFVRSPDVKRNIMHLTHRMVKMFCGNLDMQDNPNFPNLTRMNNNGVKLSIRVNHTGPNEPKGTIIGAAICFRVPLSPQIVFDNLIDNNKRAKVQSXNSYTWHEIQRISTGSNPGNCISIMRMLXGSMLVFAPFYMEGLDLIMKGEDSSLFPILPSGLTISWDYQSNKVPEGQSGQVGQSRGSLVTLMFQLLASSTSKIDNVDMKLIGSINTLVTSTVEKIKDALNCSNSK

SEQ ID NO: 31465 - protein, 289 aa, Glycine max
  Clone ID: TF_GmC419_206.pep
MVEHADLKDGGGDAVSWQIGRCKTEILQHPLYEQLLSAHVACLRIATPVDQLPRIDAQLAQSQNVVAKYAVFGHNNIVADDKELDQFMSHYVLLLCSFKEQLQQHVRVHAMEAVMACWELEQSLQSLTGVSPGEGTGATMSDDENDQVDSDANLFDCSFDGADSMGFGPLVPTESERSLMERVRQELKHELKQGYKEKIVDIREEILRKRRAGKLPGDTTSVLKAWWQSHSKWPYPTEEDKARLVQETGLQLKQINNWFINQRKRNWHSNPSTSTALKSKRKRSNAGDN

SEQ ID NO: 31466 - protein, 251 aa, Glycine max
  Clone ID: TF_GmC1293_1.pep
MLPGTTRGETPRLRIVDQSLRQQRAFQQISIMETHPWRPQRGLPERSVSVLRAWLFEHFLHPYPSDVDKHILARQAGLSRRQVSNWFINARVRLWKPMVEEMYLEEEKEQENDVASSDINVPEEDEKPTQEAPLLRIDSECMSSIVNDVTKSGKTIQNDNQMDAFGSVELDFSSYTHAHHSSGVSLTLGLQQHGESGVSLAFLPAATQSSMFYPRDQIQECQTVQYSLLDAEGQNMPFRNVMGTHLLHDLV

SEQ ID NO: 31467 - protein, 292 aa, Glycine max
  Clone ID: TF_GmC585_1.pep
MQEAGLGMGMGMMSGEVSAAGDHHRQVKAEIANHPLYEQLLSAHVSCLRVATPIDQLPLIDGQLSQSHHLLRSYASHHSHSLSPHDRQELDNFMAQYLIVLCTFKEQLQQHVRVHAVEAVMACRDIESTLQALTGVSLGEGTGATMSDDEDDLQMDGSLDQSSADGHDMMGFGPLLPTESERSLMERVRQELKIELKQGFKSRIEDVREEILRKRRAGKLPGDTTSVLKAWWQQHAKWPYPTEDDKAKLVEETGLQLKQINNWFINQRKRNWHSNSQSVNSLKSKRKREYAH

SEQ ID NO: 31468 - protein, 702 aa, Glycine max
  Clone ID: TF_GmC1515_1.pep
MATYFNGSTSEIQPSADGGLQTLYLMNPTYVPYADAPHHPTTLLVNPNAPNLANIPHAPPVSPNQQHHHVIHGVTSIIGSGNSDDHSRPSLIGENIAAFHGFSGGAGTASTTAPRLHYNLWGPVVDQPGTPSSSSGGGGFRRPSQQGLSLSLSSQQTNFRSVSGELDVAGQGHVAGIGNSPMSASIGVSGVIMGSKYLKAAQELLDEVVNVGKGIYKEEKFSESVKANRESTNSGAAGDGGDGSSGGGENSAGKQVVELSTAQRQELQMKKSKLVTMLDEVEQRYRQYHHQMQIVVSSFEQAAGYGAAKSYTALALKTISKQFRCLKDAISAQIKATSKTLGEDDCLGVKVEGSRLRYVDHHLRQQRALQQLGMIQPNAWRPQRGLPERAVSILRAWLFEHFLHPYPKDSDKVMLAKQTGLARSQVSNWFINARVRLWKPMVEEMYLEEIKEHEQGNGSENTKSKESSKELASTANVALDHLQSKHESFNNQNTSPTEISTSSSMSPMGGSLQSHSGFHLAGSSDMQIRSPNKPRSSEMQNSPSSILSVDMEMKHSGDHGNNRDANTKFGIERHHQQKDGYPLMTSNPNHGGGFGAFTMEDIGSRFNVTTEQLASRFHGNGVSLTLGLPHNENLSMSGTQQHGFLSQNIHLGRRLEMGTNGNEFCTINTAPPSSHSGTTYESIDIQNRKRFVAHQLLPDFVA

SEQ ID NO: 31469 - protein, 251 aa, Glycine max
  Clone ID: TF_GmC1117_2.pep
MPRVLPEAARTADESLSPLLQLPLIDAQLSQSHHLLRSYVSHNTLSLSPHHRQELDNFLAQYLIVLCTFKEQLQQHVRVHAVEAVMACRDIENTLQALTGVSLGEGTGATMSDDEDDLQMDFSLDQSSAEGHDMMGFGLPTESERSLMERVRQELKIELKQGFKSRIEDVREEILRKRRAGKLPGDTTSVLKNWWQQHAKWPYPTEDDKAKLVEETGLQLKQINNWFINQRKRNWHSNSQSVTSLKSKRKR

SEQ ID NO: 31470 - protein, 73 aa, Glycine max
  Clone ID: TF_LIB3242-236-Q1-J1-C12.pep
MSAETASGPTEDQVEILEYNFNKVDKHPDSTTLCLIAAEAGLSEEETQKWFKQRLAKWRRSEGLPSECRSVTD

SEQ ID NO: 31471 - protein, 479 aa, Glycine max
  unsure (1)..(479): unsure at all Xaa locations
  Clone ID: TF_GmC2101_1.pep
KEGNVVKTYYVGQLTSPASGLRSFEVLGSGKSNNDLSTTERQEIQIKKAKLINMLDEVEQRYRQYXHNQMKIVISSFEQAAGIGSARTYTALALQTISKQFRCLKDAITGQIRAANKSLGEEDCFGAKIEGSRLKYVDHHLRXQRAFQHLRMIHHNAWRPLRVLARIALSVLPDWKFEHFHNPYTKDSDKHMLAKQTGLTRSQVSNWFINARVRLWKPMVEEMYLEEMKEHELNGSEEKSSKSGEDPATKTTSPQEKRTSSEIESKSFNSKQDVSKQSQNTPILPTSPPSISPIGGSVKNQSGFSFMGSSELDGITQGSPKKPRNHEILHSPNRVPSINMDVKANEANNEQQLSMDHERQNNRDSYSFMGNQTNFISGFGQYPIEEIGRFDAEQFTPRFSGKNGVSLTLGLPHCDTLSGTHQSFLPNQNIQLGRGLDIGEPNQFGALNNSNSHNSAAFESINMQNPKRFAAQLLPDFVA

SEQ ID NO: 31472 - protein, 345 aa, Glycine max
  Clone ID: TF_GmC637_1.pep
MAFHDHLQHEIAFQRFTEEQELTENRDMQQRLPPPTWLNNVNARQQNFLDTEKSVDRNNRSESNCESEDLREYKADILGHPLYDQLLSAHVSCLRIATPVDQLPRIDAQLQQSQRVVEKYSALAHNGVVDEKELDQFMTHYVLLLCAFKEQLQQHVRVHAMEAVMACWDLEQSLQSLTGVSPGEGTGATMSDDEDDQAESNANLYEGSLDGGETLGFGPLVPTESERSLMERVRHELKHELKQGYKEKIVDIREEILRKRRAGKLPGDTTSLLKAWWQSHSKWPYPTEEDKARLVQETGLQLKQINNWFINQRKRNWHTNNPSSSSNSKSKRKSSAGEASNQSFM

SEQ ID NO: 31473 - protein, 370 aa, Glycine max
  Clone ID: TF_GmC637_4.pep
MAFHDHLPHEITFQPFTEEQQLGQSRDMQRLLPLSGGAPTWLNNSTAATLRQQNFLHLQPESAATTQQNDDVRGGGGSGMDRNRTESNSEPDDLAEYKADILGHPLYDQLLSAHVSCLRIATPVDQLPRIDAQLQQSQRVVDKYSGIGNGNGVVDDKELDQFMTHYVILLCAFKEQLQQHVRVHAMEAVMACWELEQSLQSLTGVSPGEGTGATMSDDEYYQAESNANLFEGSMDGADSLSFGPLVPTETERSLMERVRQELKHELKQGYKDKIVDIREEILRKRRAGKLPGDTTSLLKAWWQSHSKWPYPTEEDKARLVQETGLQLKQINNWFINQRKRNWHTNPSSSSGSKSKRKSSGAGETSNQSFM

SEQ ID NO: 31474 - protein, 651 aa, Glycine max
  Clone ID: TF_GmC2011_1.pep
PTRLRRLEKELSRELGLEPLQVKFWFQNKRTQMKTQHERHENTNLRTENEKLRADNMRYREALSNASCPNCGGPTAIGEMSFDEHHLRLENARLREEIDRISAIAAKYVGKPVVNYSNISPSLPPRPLELGVGGAGFGGQPGIGVDMYGAGDLLRSISGPTEADKPIIIELAVAAMEELIGMAQMGEPLWLTTLDGTSTMLNEDEYIRSFPRGIGPKPSGFKCEASRETAVVIMNHVNLVEILMDVNQWSTVFSGIVSRAMTLEVLSTGVAGNYNGALQVMTAELQLPTPLVPTRESYFVRYCKQHADGTWAVVDVSLDNLRPGPSARCRRRPSGCLIQEMPNGYSKVTWVEHVEVDDRGVHNLYKQLVSSGHAFGAKRWVATLDRQCERLASAMATNIPTVDVGVITNQDGRKSMMKLAERMVISFCAGVSASTAHTWTTLSGTGADDVRVMTRKSVDDPGRPPGIVLSAATSFWLPVPPKRVFDFLRDENSRNEWDILSNGGVVQEMAHIANGRDTGNCVSLLRVNSANSSQSNMLILQESCTNSTGSFVIYAPVDIVAMNVVLNGGDPDYVALLPSGFAILPDGTTSHNGSGGIGETGPSGSLLTVAFQILVDSVPTAKLSLGSVATVNNLIACTVERIKASLSGEPA

SEQ ID NO: 31475 - protein, 538 aa, Glycine max
  Clone ID: TF_GmC1817_1.pep
MLNTLHLLLHHDQRIRSHLWFELTPSVHPPSSTTTVPQITKTTQRATNSALGQPCLLSLALSPPLAYSLLREFGSAWARHPVWGVPVARLAQQMLSQDGYVSSNSKVASVYQQGHFLVKNSKFLVPAQDLLNEFCSLCAKQSDLGKPTKSLKKQWEDQENNGVGSSKKHSLTSLEFVELQKRKTKLLSMLEEVDRRYKHYRNQMKSVVSSFEAVAGNGAATVYSALALKAMSRHFRCLKDGILSQIQATRKAMGEKDPVAPGTTRGETPRLKVIDQTLRQQRAFQQMSMMETHPWRPQRGLPERAVSVLRAWLFEHFLHPYPSDVDKHILARQTGLSRGQVSNWFINARVRLWKPMVEEMYLEEVKDPENNIASSEGATDQDNDINPNNVQYPPPPLSSRSEDQKPSLVRIDSECASSIINNHSTPDNKNDPKGQEQCFGSVELDFSSYTHHSSGMVSYGSSDQNGNNNQSGVSLTLGLQQHGVSLAFPPATQSSLYYPRDQIEDCQPVHQYSLLDGEGQNLPYRNLMGAQLLHDLAG

SEQ ID NO: 31476 - protein, 121 aa, Glycine max
  unsure (1)..(121): unsure at all Xaa locations
  Clone ID: TF_LIB4280-027-R1-K1-D7.pep
MEAEAENNDVKKEENSNDNNNNNNNESNSKIGNSSEGLSKPKRQMKTPFQLETLEKAYAVENYPSETMRXELSEKLGLSDRQLQMWFCHRRLKDKKELPSKKPRKGSGVAGFSGGGAQVGA

SEQ ID NO: 31477 - protein, 212 aa, Glycine max
  Clone ID: TF_LIB4366-009-R1-K1-A7.pep
MMEPQQQQQQAQGSQQQQQNEDGGSGKGGFLSRQSSTRWTPTNDQIRILKELYYNNGIRSPSAEQIQRISARLRQYGKIEGKNVFYWFQNHKARERQKKRFTSDHNHNNVPMQRPPTNPSAAWKPDLADPIHTTKYCNISSTAGISSASSSVEMVTVGQMGNYGYGSVPMEKSFRDCSISAGGSSGHVGLINHKLGWVGVDPYNFSTYANFF

SEQ ID NO: 31478 - protein, 91 aa, Glycine max
  unsure (1)..(91): unsure at all Xaa locations
  Clone ID: TF_uC-gmroLIB3259P256d10a1.pep
KKGSLSLEQIKALEKNFWVXNKLYPXRKVKLPQKLGLHPKQKTVWFPTPRPRWKPPPLGRDKKFRGLWNFFLPQFFGGVDPKNPCYILRGG

SEQ ID NO: 31479 - protein, 110 aa, Glycine max
  Clone ID: TF_10847932.pep
MDEGLSGFCIISSSGSVRGKSGTKCGRWNPTTEQVKLLTELFRSGLRTPSTDQIQKISTQLTFYGKIESKNVFYWFQNHKARERQKNRKLSFDDHKDLICRQNAPSTQSK

SEQ ID NO: 31480 - protein, 235 aa, Glycine max
  Clone ID: TF_GmC1705_1.pep
IRIHSLAQHFAFQPRQVAIWFQNRRTRFKTKQLEKDYGVLKASYDRLKSDYESFGQEIEMQNPRVHDSESKHCIKDGEKQEHSDEKSSPDDAVNSSSPHNNKEPMDLLIISKNATTTTTSENGTKVLSPLPLPIMVTCCKQEDANSAKSDVLDSDSPHCTSFVEPADSSHAFEPEDHSEDFSQDEEDNLSENLLMTFPSSCCLPKVEEHCYDGPPENSCNFGFQVEDQTFCFWPY

SEQ ID NO: 31481 - protein, 244 aa, Glycine max
  Clone ID: TF_GmC1293_3.pep
MMYYQSKSALKRTSSGKKVIAVVVPQRTTSLSSLEYVELQKRKTKLLAMLEEVDRRYKHYRNQMKGVVSSFEAVAGNGAATVYSALALKAMSRHFRCLKDGIMDEIEATRKGMGEKDHVAAVPGTTRGETPRLRIVDQSLRQQRAFQQISIMETHPWRPQRGLPERSVSVLRAWLFEHFLHPYPSDVDKHILARQAGLFRRQVSNWFINARVRLWKPMVEEMYLEDEKEHEHDVASSILMFPRG

SEQ ID NO: 31482 - protein, 138 aa, Glycine max
  Clone ID: TF_GmC2011_2.pep
MQAGIMMIPARNMPSMIARNNNVVGLRNYKPLRNLKRSIAIIMFQPNLMDALEMGQNTSESEVPRILEDEFDSATKSGSENHEGASGEDQDPRPNKKKRYHRHTQHQIQEMEAFFKECPHPDDKQRKELSRELGLEPL

SEQ ID NO: 31483 - protein, 133 aa, Glycine max
  Clone ID: TF_LIB3108-022-Q1-K1-A9.pep
HPGGEHTGEKDRTFETSFIREQWALQQLRRNEQQSWRPQRGLPEKSVSVLRAWMFQNFLHPYPKDNEKHLLAIQSGLTRSQVSNWFINARVRLWKPLIEEMYSEVNKKNRPIEGSGCDSRNYASIGNQRIQMN

SEQ ID NO: 31484 - protein, 68 aa, Glycine max
  Clone ID: TF_GmC419_97.pep
GSRTSVLKAWWQSHSKWPYPTEEDKARLVQETGLQLKQINNWFINQRKRNWHSNPSTSTALKSKRKRS

SEQ ID NO: 31485 - protein, 138 aa, Glycine max
  unsure (1)..(138): unsure at all Xaa locations
  Clone ID: TF_GmC228470_1.pep
IIVNVCIACRTKLKQTEVDCWYLKRCCGALTEENRSFRNEGQEIRALKTSKCNYKQLPSTXMCPSCERVATNSTSTSLSISATINATNSGAMASVKTSNNNNNNDSTSKAIGFPFGKPRFHPFVHSSQQPHQHQSTAS

SEQ ID NO: 31486 - protein, 193 aa, Glycine max
  Clone ID: TF_GmC143165_1.pep
VTRRYKQYHQQMQMVVQSFESVVGLSSATPYVSLALKSISKHFRCLKNAISDQLKLTCEVLGEDYSIPTTSTGSKFDNNVARLRCMDQNFQKNKSGGANINFLEPQQHVWRPQRGLPERSVAILKAWLFEHFLHPYPTDTDKHMLASQTGLSRHQVSHWCINARVRVWKPMVEEIHMLETKGATEAHQHQTSS

SEQ ID NO: 31487 - protein, 76 aa, Glycine max
  unsure (1)..(76): unsure at all Xaa locations
  Clone ID: TF_701134378H1.pep
MVPIDGRGRVRRGSLRRXRRLSVXQVXALEKNFEVEXKLEPERXVKLAQXLGLQPXQVAVWFXNRRAXWKTRXWRE

SEQ ID NO: 31488 - protein, 155 aa, Glycine max
  unsure (1)..(155): unsure at all Xaa locations
  Clone ID: TF_LIB4392-003-Q1-K1-B8.pep
MGDFIFSFKTQQQEHHAHHQRAKHIFFKKRLTEDQVSILEKCFSSNMKLEPEQKFHLANQLGLPPRQVAIWYQNKRARWKTQSLEVDHGVLQAGXENVVAEKKQLEKDVERLKAELKKAQEMLLITNSVKGGDHNNNNACEFSTSFEEGGSWGGA

SEQ ID NO: 31489 - protein, 131 aa, Glycine max
  Clone ID: TF_GmC53_2.pep
QILSTVTVLSSSESTCQIQIRFISFLIYTNSARGKYGGYLSSLRKEFLKKRKKGKLPKDARMILMDWWNTHYRWPYPTEEEKVQLSEMTGLDQKQINNWFINQRKRHWKPTEDMRFAIMDGVSGSGLGGPM

SEQ ID NO: 31490 - protein, 766 aa, Glycine max
  Clone ID: TF_GmC378_1.pep
MQNSSCFLCSTQRKMEGPSEIGLIGENFDAGLMGRMRDDEYESRSGSDNFEGASGDDQDGGDDQPQRKKRYHRHTPHQIQELEAFFKECPHPDEKQRLDLSKRLGLENKQVKFWFQNRRTQMKTQLERHENIMLRQENDKLRAENSLIKEAMSNPVCNNCGGPAIPGQISFEEHQIRIENARLKDELNRICVLANKFLGKPISSLTSPMALTTSNSGLELGIGRNGIGGSSTLGTPLPMGLDLGDGVLGTQPAMPGVRPALGLMGNEVQLERSMLIDLALAAMEELLKMTQAESPLWIKSLDGEKEIFNHEEYARLFSPCIGPKPAGYITEATRETGIVIINSLALVETLMDANRWAEMFPSMIARAINLDVISNGMGGTRNGALQVMHAEVQLLSPLVPVRQVYGCKKTTEGAEGVWAVVDVSIEIGHDAANAQPSISCRRLPSGCIVQDMPNGYSKVTWLEHWEYDENVVHQLYRPLLSSGVGFGAHRWIATLQRQCECLAILMSSSISSDSHTALSQAGRRSMLKLAQRMTSNFCSGVCASSARKWDSLHIGTLGDDMKVMTRKNVDDPGEPPGIVLSAATSVWMPVSRQRLFDFLRDERLRSEWDILSNGGPMQEMVHIAKGQGHGNCVSLLRANAVNANDSSMLILQETWMDASCSVVVYAPVDVQSLNVVMSGGDSAYVALLPSGFAILPDGHCNDNGCNGSLQKGRGSDDGSGGSLLTVGFQILVNSLPTAKLTVESVDTVNNLISCTIQKIKAALRVA

SEQ ID NO: 31491 - protein, 127 aa, Glycine max
  Clone ID: TF_LIB3242-270-Q1-J1-B8.pep
MSLSGIENKCNEVHGDDELSDDGVFQSGEKKKRLNLEQVKALEKSFDQGNKLEPERKVQLAKALGLQPRQVAIWFQNRRARWKTKQLEKEYEVLKKQFEAVKADNDVLKVRNQKLQAELQAVKSKDW

SEQ ID NO: 31492 - protein, 262 aa, Glycine max
  Clone ID: TF_GmC1019_2.pep
MVNAMEWQKQRCWQPNRNAEMMCVKVMTDEQLEILRKQIAVYATICEQLIEMHKNISAHQDLAGIRLGNMYCDPLLGSGGLKIASRQRWTPTAMQLQILERIFDQGIGTPTKEKIKEITNELSQHGQISETNVYNWFQNRRARSKRKQQNVAPSANAESEVETEVDSKDKKTKPDEFQAPPSVSAGPADNLGFQNHDSLQYLNPESNKPDSVFPSDGTRNFHHVPAFDGLLSNSRSNYLTGKLETPENYELYQPAGDYNIAG

SEQ ID NO: 31493 - protein, 190 aa, Glycine max
  unsure (1)..(190): unsure at all Xaa locations
  Clone ID: TF_GmC597467_1.pep
MALCMQSQQRDSASNKLLMDCGKYVRYTPEQVEALERVYIECPKPSSSRRQQIIRECPLLANIETKQIKVWFQNRRCREKQRKEASRLQTVNRKLSAMNKLLMEENDRLQKQVSQLVYDNGFMKQQIHTASATTTTDNSCESVVVSGQRQHQNPKIQHPQWDANNPAGLLAIAQETLAAXLSKATGTAVN

SEQ ID NO: 31494 - protein, 524 aa, Glycine max
  Clone ID: TF_GmC1502_1.pep
ESSELQSEENKVSNEKNKKRKLKTPAQLKALENFYNEHKYPTEEMKLVLAEELGLTEKQISGWFCHRRLKDKRLMKDEAVANGRQDRSSGVIQDRGSGLGQDSCGSSKHADHRYLDPKEVESHGLYNHELSVADMTHRRRNHYPENVSGVDDTSSESSSFLQERFSQGQDPYDMEPSRHLTPNGALPPLNPKGAVKMGHKPSGYLKVKGEIEHAAITAVRKQLGRHYLEDGPLLGIEFDPLPPGAFECQTADPANEPYSVTNPLLSNSPEISAAKRQPSISSRYDSYYTKFRSQDSHMEGADFGSLHESDFQDKQDKKACQNIKQRQSLYGYTNHFPGRNTFPDLYEDSTGEASAYNSNKSHRMSTKHGVEGMRSDSASNHSDHYEEKLTVKQKTLMLHGYDNINPKNIQRSEHVKSKPSSSIHNSRVPMDTEERGLSARMAKEEMFKGDRKAKNTYCNVDGAGMLSNEIMVAKRAKVDMLQQYNVKKSPVAEMEQRKIQRSAADLPSSFSEDETADTNSSLDY

SEQ ID NO: 31495 - protein, 104 aa, Glycine max
  Clone ID: TF_GmC1502_3.pep
MEESSELQSEENKVSNEKNKKRKLKTPAQLKALENFYNEHKYPTEEMKLVLAEELGLTEKQISGWFCHRRLKDKRLMKDEACANGRQIVQGCHPDRAVDLGRFM

SEQ ID NO: 31496 - protein, 310 aa, Glycine max
  Clone ID: TF_GmC18168_1.pep
FGSRTFADFCLSLSYHHNSQSSETERDGERGGIQKQLQRWQQSGNVNVNVNVDANGELMYVKVMTDEQLETLRKQIAVYGTICEQLIEMHRTLSAQQDLAGVRLGNIYCDQLMTSGGHKITSRQRWTPTPVQLQILERIFDQGNGTPSKEKIKEITAELGQHGQISETNVYNWFQNRRARSKRKLQNVAPYSTESEVDTEVDSKNKKTKAEEEFQSQHNITTSGGAEKLCFQNPQVYSDHLHYLNPDSNKPYSMCQSDCNLKSTRNSSHVSVFNEMLSNSRSEYVGGKMEVAGSVSYNLFHQTGDCNLAG

SEQ ID NO: 31497 - protein, 322 aa, Glycine max
  Clone ID: TF_GmC30_1.pep
MKRLSSSDSSSALMTICPSTEEHSPRNSQHMYGREFQSMLDGLDEEGCVEEPGYQSEKKRRLSVDQVKALEKNFEVENKLEPERKVKLAQELGLQPRQVAVWFQNRRARWKTKQLERDYGVLKANYDALKLNFDTLDQDNEALRKQVKELKSRLLQEENTGGSGVSVKEEIITRPADSEDKTMEQSKSDPSSETSNINPSSESEEDHLNYECFNNNDDCVGGTAASLLQVDFKDGSSDSDGSSAILNEDNMYSPLKFNNCSISTSPSSSSMMNCFQFQKPYHHHAQYVKMEEHNFLSADEACNFFSDEQAPTLQWYCPEQWS

SEQ ID NO: 31498 - protein, 322 aa, Glycine max; identical to SEQ ID NO: 31497
  Clone ID: TF_GmC30_3.pep

SEQ ID NO: 31499 - protein, 133 aa, Glycine max
  Clone ID: TF_GmC30_5.pep
ICIGLEEHSPRNSQHMYGREFQSMLDGLDEEGCVEEPGYQSEKKRRLSVDQVKALEKNFEVENKLEPERKVKLAQELGLQPRQVAVWFQNRRARWKTKQLERDYGVLKANYDALKLNFDTLDQDNEALRKQVE

SEQ ID NO: 31500 - protein, 322 aa, Glycine max
  Clone ID: TF_GmC30_6.pep
MNYLMGEEGEVVRKQGQRGVEEHSPRNSQHMYGREFQSMLDGLDEEGCVEEPGYQSEKKRRLSVDQVKALEKNFEVENKLEPERKVKLAQELGLQPRQVAVWFQNRRARWKTKQLERDYGVLKANYDALKLNFDTLDQDNEALRKQVKELKSRLLQEENTGGSGVSVKEEIITRPADSEDKTMEQSKSDPSSETSNINPSSESEEDHLNYECFNNNDDCVGGTAASLLQVDFKDGSSDSDGSSAILNEDNMYSPLKFNNCSISTSPSSSSMMNCFQFQKPYHHHAQYVKMEEHNFLSADEACNFFSDEQAPTLQWYCPEQWS

SEQ ID NO: 31501 - protein, 172 aa, Glycine max
  Clone ID: TF_GmC73539_1.pep
MEFGSGSPGDHHHHHDGSSDSQRRKKRYHRHTANQIQRLESMFKECPHPDEKQRLQLSRELGLAPRQIKFWFQNRRTQMKAQHERADNCALRAENDKIRCENIAIREALKNVICPSCGGPPMNDDCYFDEQKLRLENAQLKEELDRVSSIAAKYIGRPISQLPPVEAIDICC

SEQ ID NO: 31502 - protein, 156 aa, Glycine max
  unsure (1)..(156): unsure at all Xaa locations
  Clone ID: TF_GmC391285_1.pep
ARGLGGAARVLDVNLFRAATAEDGDDGTSLSSSPNSAVSPFQMDFCTRNCNAEFGGRNKREQQEAEGRASDDDENGSTRKKLRLSKEQSAFLEESFKEHTTLNPKQKLALAKQLNLRPRQVEVCVXNRRARTKLKQTELGCEYLKKCCENLNRRRL

SEQ ID NO: 31503 - protein, 284 aa, Glycine max
  Clone ID: TF_GmC4473_2.pep
MESGRIFFGASASSGNNMLFLGNTELAFRGRSIMSMEEASKRRPFFTSPDELYDEEYYEKQSPEKKHRLSSEQVHLLEKSFEEENKLEPERKTQLAKKLGLQPRQVAVWFQNRRARWKTKQLERDYDVLKSSYDTLLSSYDSIMKENEKLKSEVVSLNEKLQVQAKEVPEEPLCDKKVDPIPVDEDMAPIFGTRVEDHLSSGSVGSAVVDEGSPQVVVDSVDSYILADNYGGCVGPVERVQSEEEDGSDDGRSYLDVFVVSETEHQNHEEGETLGWWTNMYYVG

SEQ ID NO: 31504 - protein, 281 aa, Glycine max
  Clone ID: TF_GmC444_2.pep
MAFFPANFMLQTPHQDDHQPPPSLNSIITSCAPQEYHGGGASFLGKRSMSFSGIELGEEANAEEDLSDDGSQAGEKKRRLNMEQVKTLEKSFELGNKLEPERKMQLARALGLQPRQIAIWFQNRRARWKTKQLEKDYDLLKRQYEAIKSDNDALQAQNQKLQAEILALKSREPTESINLNKETEGSSSNRSENSSEIKLDISRTPAIDSPLSTQQNNNNRTLFPSSARPTGVAQLFQTTPRPEIQCQKIDHMVKEESLSNMFCAIDDQSGLWPWLEQQHFN

SEQ ID NO: 31505 - protein, 300 aa, Glycine max
  Clone ID: TF_GmC444_3.pep
NILSEDVVQHKTCNEMAFFPANFMLQTPHHDDHHHHQPPPSLTSILPTCAPQEYHGGVTILGKRSMSFSSGIEHGEEANNAEEDLSDDGSQAGEKKRRLNMEQVKTLEKSFELGNKLEPERKMQLARALGLQPRQIAIWFQNRRARWKTKQLEKDYDVLKRQYEAVKSDNDALQAQNQKLQAEILALKSREPTESINLNKETEGSCSNRSENSSDIKLDISRTPAIDSPHSTHQQSRPFFPPSSARPAGVAQLFQTSSRPDLPSCQKIDQMVKEESLSNMFCGMDDQSGFWPWLEQQHFN

SEQ ID NO: 31506 - protein, 159 aa, Glycine max
  Clone ID: TF_GmC444_4.pep
RFCGRHKTCNEMAFFPANFMLQTPHHDDHHHHQPPPSLTSILPTCAPQEYHGGVTILGKRSMSFSSGIEHGEEANNAEEDLSDDGSQAGEKKRRLNMEQVKTLEKSFELGNKLEPERKMQLARALGLQPRQIAIWFQNRRARWKTKQLEKDYDVPKRQH

SEQ ID NO: 31507 - protein, 308 aa, Glycine max
  Clone ID: TF_GmC3110_1.pep
MGEKDDGLGLGLSLKLGWGENNDNNNNQQQHPFNVHKPPQSVPNQRVSVNSLFHFHDRSSEMRSFFRGIDVNLPPPPPSAALAAFDDENGVSSPNSTISSINGKRSEREGNGEENERTSSSRGGGGSDDDEGGACGGDADADASRKKLRLSKEQALVLEETVKEHNTLNPEQKQALAKQLNLMPRQVEVWFQNRRARTKLKQTEVDCEYLKRCCENLTEENRRLQKEVQELRALKLSPQLYMQMNPPTTLTMCPSCERVAVSSASSSSSATMPSALPPANLNPVGPTIQRPMPVNPWAAMLNQHRGRP

SEQ ID NO: 31508 - protein, 132 aa, Glycine max
  unsure (1)..(132): unsure at all Xaa locations
  Clone ID: TF_jC-gmle01810092g05a1.pep
ADLICIGLDEHSPRNSLHMCGMEFLSMLDGLDEERCGDXPRHYSVKRLRLTVLQVYAMXKNFDXDNTLAPETKVKLAQELGLPPTPVAIWIQNLRTRWRTILLERDYGDLIANDDALKLNYGTLNEDNLILL

SEQ ID NO: 31509 - protein, 166 aa, Glycine max
  unsure (1)..(166): unsure at all Xaa locations
  Clone ID: TF_jC-gmro02910022c12d1.pep
MERGDCQFTVVPPRQYDEAQFMHQLMVAGDQQDPAGAGRGAAAAGGERKRRFTEEQVRSLETTFHARRAKLEPREKAELARELGLQPRQVAIWFQNKRARWRSKQLEHDYAALRAQFDAMHARVESLRQEKIALAAQVDELXGRLNERQDQSGSCEVNDAEAAADD

SEQ ID NO: 31510 - protein, 345 aa, Glycine max
  Clone ID: TF_GmC1705_3.pep
MASGKLYAGSNMSLLLQNERLPCSSEVLESLWAQTSNPASFQGSKPVVDFENVSGSRMTDRPFFQALEKEENCDEDYEGCFHQPGKKRRLTSEQVQFLERNFEVENKLEPERKVQLAKELGLQPRQVAIWFQNRRARFKTKQLEKDYGVLKASYDRLKSDYESLVQENDKLKAEVNSLESKLILRDKEKEENSDDKSSPDDAVNSSSPHNNKEPMDLLIISKNATTTTTSENGTKVLSPLPLPIMVTCCKQEDANSAKSDVLDSDSPHCTSFVEPADSSHAFEPEDHSEDFSQDEEDNLSENLLMTFPSSCCLPKVEEHCYDGPPENSCNFGFQVEDQTFCFWPY

SEQ ID NO: 31511 - protein, 326 aa, Glycine max
  Clone ID: TF_GmC1520_1.pep
MAAGTVFCAAATAASNLTTTTFLHNQTPPSTSSQPPLDSLFLSASSPFLGSRSIVSFGDVQGGKGCNDSFFRPYDENGDEDMDEYFHQPEKKRRLSVEQVKFLEKSFDEENKLEPERKIWLAKELGLQPRQVAIWFQNRRARWKTKQMEKDYDSLQASYNDLKANYDNLLREKDKLKAEVARLTEKVLGREKNESHLEQAETNGLQEPLHKSLVDSASEGEGSKVTFEACKQEDISSAKSDIFDSSESPQYTDGVHSALLETGDSSYVFEPDRSDVSQDEEDNLSKTLLPHYIFPKLEDVDYSDPPHGSCNFGIPEEDQAIWSWPY

SEQ ID NO: 31512 - protein, 311 aa, Glycine max
  Clone ID: TF_GmC952_1.pep
MKRLGSSDTLGALMTICPPTDEHSPRNNHAYGREFQSMLEGLDEEGCVEEPGHHSEKKRRLSVDQVKALEKNFEVENKLEPDRKLKLAQELGLQPRQVAVWFQNRRARWKTKQLERDYGVLKANYESLKLNYDTLQQDDEALLKEIKELKSRLVQEENNNNTESDVSVKEEMLTTTLCETAIPGSDTKELSYECFNKSDEVGGGSSVFHVDFKDGSSDSDSSAILNEENNNHSPNNNAAISSCGVLQSHGLLSSPSSSSMNNCFQFQKQYQTTTQYVKMEEHNFLSADEACNFFSDEQAPTLQWYCSEEWS

SEQ ID NO: 31513 - protein, 312 aa, Glycine max
  Clone ID: TF_GmC952_2.pep
MKRLGSSDSLGALMTICPPTDEHSPRNNHAYGREFQSMLEGLDEEGCVEEPGHHSEKKRRLSVDQVKALEKNFEVENKLEPDRKLKLAQELGLQPRQVAVWFQNRRARWKTKQLERDYGVLKANYESLKLNYDTLQQDHEALLKEIKELKSRLVQEENNNNTESDVSVKEEMLTTTLCETAIPGSDTKELSYECFNKSDEVGGGSSVFHVDFKDGSSDSDSSAILNEENNNHSPNNNAAISSCGVLQSHGLLLSPSSSSMNNCFQFQKQYQTTTTQYVKMEEHNFLSADEACNFFSDEQAPTLQWYCSEEWS

SEQ ID NO: 31514 - protein, 216 aa, Glycine max
  unsure (1)..(216): unsure at all Xaa locations
  Clone ID: TF_GmC1502_2.pep
MEESSELQSEENKVSNEKNKKRKLKTPAQLKALEDFYNEHKYPTEEMKLVLAEELGLTEKQISGWFCHRRLKDKRLMKDEAVANGRQDRSSGVIQDRGSGLGQDSCGSSKHADHRYLDPKEVESHGLYNHELSVADMTHRRRNHYPENVSGVDDTSSESSSFLQERFSQGQDPYDMEPSRHLTPNGALPPLNPKGAVKMGHKPSXYLKVKGEIEHA

SEQ ID NO: 31515 - protein, 154 aa, Glycine max
  Clone ID: TF_GmC30_10.pep
MKRLNSSDSSTALMTIFPSSSTEEHSPRNSHHMYGREFRSMLDGLDEEGCVEEPGHQSEKKRRLSVEQVKALEKNFEVENKLEPERKVKLAQELGLQPRQVAVWFQNRRARWKTKQLERDYGVLKANYDALKLNFGTLNQDNEALRKQIKELKS

SEQ ID NO: 31516 - protein, 92 aa, Glycine max
  Clone ID: TF_GmC75260_1.pep
MEEATEFHSEENKLSMEKNKKRRLKTPAQLKGLEDFYNDNKYPTEEMKSELADELELTEKQISGWFCHRRLKDKKMLNDEVCANGRHDRSSG

SEQ ID NO: 31517 - protein, 191 aa, Glycine max
  unsure (1)..(191): unsure at all Xaa locations
  Clone ID: TF_GmC451723_1.pep
MGADMSNNNNPPPTSHAKDLFASPALSLSLAGIFRHAGVAAADEAATSVEEGAGGSGGAADRLEEISSENSGPTRSRSEDDLSGGEADPEDDDDAHGDSEDKKTKKKKKKYHRHTAEQIREMEALFXESPHPDEKQRQQLSNQLGLAPRLVKFWFQNRRTQIKAIQERHEYSLVKTELDRLREENKAMRET

SEQ ID NO: 31518 - protein, 283 aa, Glycine max
  Clone ID: TF_GmC1235_1.pep
MGLDQDANSSGLHLVLGLSLTASVKETTQSTKPDDDHHLCVIKPTPTKPYPSNEPSLTLGLSGKGYHVPNHVAINKVYCEDPLEFSRQTSPHSVVSSFSTGRVIKRERDLSCEDMEVEAEERVSSRVSDEDEDGTNARKKLRLTKEQSALLEESFKQHSTLNPKQKQALARRLNLRPRQVEVWFQNRRARTKLKQTEVDCEFLKKCCETLKDENRRLKKELQELKALKLAQPLYMPMPAATLTMCPSCDRLGGVNDNGSNKSPFSMAPKPHFYNPFANPSAAC

SEQ ID NO: 31519 - protein, 309 aa, Glycine max
  unsure (1)..(309): unsure at all Xaa locations
  Clone ID: TF_GmC66552_1.pep
MSFHDTSNTGLGLGLGLGLVSFHDQSGNCMKSTNNDPMRESHKIKKVENPSSKCNNTYPSLTLGPPDDDDGDDDDEVNNNNQPSSKTESYEYFRPQVSSPSAVSSFSNSSSIKRERDQVLGGEEFEVVVEKVPTRVVGDVDEDGNPRKKLRLTXEQAAVLEENFREHSTLNPKQKQELAMKLNLRARQVEVWFQNRRARTKLKQTESDCELLKKCCDTLTVENKKLQKELQELKSMQATPVPLYMQIPAATLSICPSCERICGGNENNGDNNNNGSSHTTTLLIGSKTHHHSFYKSNNYPFPHSSSAAC

SEQ ID NO: 31520 - protein, 159 aa, Glycine max
  unsure (1)..(159): unsure at all Xaa locations
  Clone ID: TF_LIB4167-033-R1-K1-F6.pep
FWEARMYGDCQVMSSMGGNVVVNSDTLFSSSIQNSSFNFIPTMPFQPFPSMKEEDGILRGKEEMESGSGSEQLVEDKSGYEQESHEEPTKKKRYHRHTARQIQEMESLFKECPHPDDKQRLKLSHELXLKPRQVKFWFQNRRTQMKAQQDRADNMILRA

SEQ ID NO: 31521 - protein, 266 aa, Glycine max
  Clone ID: TF_GmC1019_1.pep
MVNVMEWQKQRWQPNGNAEMMYVKVMTDEQLETLRKQIAVYATICEQLIEMHKNISSHQDLAGIRLGNMYCDPLLGSGGHKIASRQRWTPSAMQLQILERIFDQGTGTPTKEKIKEITNELSQHGQISETNVYNWFQNRRARSKRKQQNVAPSANAESEVETEVDSKDKKTKPDEFQSPPSVSAVPADDNLGFQNHGSLQYLNPESNKPDSVFPSDASLRSTRNFNHVPVFDGLLSNSTSDYLTGKMEAPENYDLYQPAGDFNMAG

SEQ ID NO: 31522 - protein, 782 aa, Glycine max
  Clone ID: TF_GM240G09rgnA1.C1.o4.ma.pep
MYPSNLGGSGRGNRLNHATVSKLEAIFRECPYPNENRRRQISEELELSLNQVKFWFQNRKTKLKVVYYFLYDASFLRTIIYTLVLCNFQAISERIDNNALRRENENIQSENLLMRESLQNAFCLSCGGLPVGSVERKLQLQSLKAKNIQLAKEARGRLLNPIVGLPSPYQHSHVLSTPGFNQDIPAPAPALDCYIPDPPSDDVALDYCIPTPASVLAVDHSIPALASDPWLGQDIPHLPTLATLDQDIPPLGQDTSTLPQDHMPKDLDQELDALRGILNNDLIFQSIINQRIDLDNAMMSQIANNAIEELIKLLDMNQPFWSIHDWKLVLKRDNYQSILGRRHCLPGPHARIESSKDSRIVDMNAEQLVQMFMNLEKWVDLFPTIVTKAQTIQVLENGLVGNRSGALLLINAEMHILSHLVPTRQFYFLRYCKQIKEGVWVIGDVSIDSLEYKTIVPRIWRRPSGCLIQEMNHGLCKVSWVEHVEVDDKMQTHQLFTDVICCNNAYGAERWLSTLKRMCERFACASAETIPSCDESGEAILSLEGKKSVMHLAHRMVKTFCRTLDVSDCENFPYLTRMMNNGEVTIIVRKNNSEQDVPQGLILSAATSFLLPHSPENVFDFLIDNKKRAKWEPFWYGKPGHEIQRISTGNNPGNFISITKALGPSDNNMIVLQESYADGLGSMMVYSAFDTETMNFAMRGEDTSQLLVLPSGFTISGDGHSNAFEGQSRQVVSKGSLVTLMLQVLASSTPSMDMIDMEFVGSVTTLVSSTVEKIKAALNCSN

SEQ ID NO: 31523 - protein, 173 aa, Glycine max
  Clone ID: TF_GmC3892_1.pep
HGEGGNYSKQIEDTGISDTSDDEDWNDAAAPSRKKKLTGNVTPVSPNANASNNSIHTLKRNAHQNKVENTNSSPTKSLDGRSKSGSRDKRSGSSAHKRLGEAVVQRLHKSFKENQYPDRSTKESLAQELGLTYQQVAKWFDNTRWSFRHSSQMETNSGRNASPEGTEGRAEKG

SEQ ID NO: 31524 - protein, 156 aa, Glycine max
  Clone ID: TF_GmC617300_1.pep
MEGVSEGEKKKEPVEGENKSKRKMKTASQLEVLEKAYAAEAYPSEALRAELSVKLSLSDRQLQMWFCHRRLKDRNAKKLQNDSSLAGAPAVGEEGVEQVTGADVGRDCGLASGPFNHLDSRKIAPRPGMTAFPSMGAGLPAVVGSSYYEPPQNMDV

SEQ ID NO: 31525 - protein, 832 aa, Glycine max
  unsure (1)..(832): unsure at all Xaa locations
  Clone ID: TF_GmC6526_1.pep
MMAVSSACKDGSKVALDNGKYVRYTPEQVEALERLYHECPKPSSLRRQQLIRECPILSNIEPKQIKVWFQNRRCREKQRKEASRLQAVNRKLTAMNKLLMEENDRLQKQVSHLVYENSFFRQQTHNNNATLATTDTNTSCESVVTSGQRNLTPQQHPPRDASPAGLLSIAEETLAEFLSKATGTAVEWVQMPGMKPGPDSIGIVAISHGCPGVAARACGLVGLEPTRVVFSSCNFAVEWMSMQLAPAQNLFLLQSMHLSLMMRPFYLLSTSLLEDGSFVVCERSLNNTQNGPAMPPVQHFVRADMLPSGYLIRPCEGGGSQPWPDNMFVVSXCSVQRVSLALSPSRXVLTMLSTYHLALLRHKHLLDGSVTATGSXSWGRTSKXVKAVNPFSSLFGITQMQFCAALXSMLESDGIDDVTLLVNSSPSKMMGVSLVYNNNGFPSVSSSVLCEFPQIMQQNVPPAILLRFLREHRSEWADSSIDAYSAAAIKAGPCSLPGARSGGFGGRVILPLAHTIEHEEFMEVIKLENMGYYRDDMSIPGDVFLLQLCSGVDEHAVGTSAELVFAPIDASFSDDAPILPSGFRIIPLDSGTDAASPNRTLDLASALEVGTTANKAASDNSAHSGSTKSVMTIAFQFAFEVHLQENIATMARQYVRSIIASVQRVSLALSPSRFGSHNAFHLPPGTPEAQTLARWICNSYRFYLGVELLKCEGSESILKSLWHHSDAVLCCSLKALPVFTFANQAGLDMLETTLVALQDITLEKIFDDNGKKTLCTEFPQIMQQGFMCIQGGICLSSMGRPVSYERAVAWKVLNEEESAHCICFMFINWSFV

SEQ ID NO: 31526 - protein, 183 aa, Glycine max
  Clone ID: TF_GmC69305_1.pep
MELALSLGDTPKPFSLPAKNDSVSFKIALGDDKRVSSDPPVQLDLLPSTPVLPSSRLRIPWLSDALGMERVTSEIPVRAVDDTDDGAALSSPNSAVSSFQMDFCFRNSRKSCEGASDEDDENGSTRKKLRLSKQQSVFLEESFKEHTTLNPKQKLALAKQLNLRPRQVEVWFQNRRARTKLKQ

SEQ ID NO: 31527 - protein, 224 aa, Glycine max
  Clone ID: TF_GmC1889_1.pep
MVPFIVFCVFSMAVLPSSSSSLELTISVPGFASSPTLLPSSSVKELDINQVPLEEDWMASNMEDEEESSNGEPPRKKLRLTKEQSLLLEESFRQNHTLNPKQKESLAMQLKLRPRQVEVWFQNRRARSKLKQTEMECEYLKRWFGSLTEQNRRLQREVEELRAIKVGPPTVISPHSCEPLPASTLSMCPRCERVTSTADKPPSAAATLSAKVPPTQSRQPSAAC

SEQ ID NO: 31528 - protein, 151 aa, Glycine max
  Clone ID: TF_GmC126645_1.pep
MEGNYGSTRRYVPRADSSLSFLYNYNYTPYPGMEVKQQTLAGTSSSMEKVNCGNQEKKKRLTSDQLDSLENSFQKEIKLDPDRKMKLSKELGLQPRQIAVWFQNRRARWKNKQLEHLYDSLKQEFDVISKEKHNLGEEVMKLNTLLREQAF

SEQ ID NO: 31529 - protein, 822 aa, Glycine max
  Clone ID: TF_GmC95_1.pep
MSFGGFLETKQSDGGGGRIVVSDIPYNSNNGSNHSNDIMPSGAISLPRLATPTLAKSMFNSPGLSLALQSDIDGQGDMNRLMPENFEQNGLRRSREEEHESRSGSDNMDGGSGDDFDAADNPPRKKRYHRHTPQQIQELESLFKECPHPDEKQRLELSRRLNLETRQVKFWFQNRRTQMKTQLERHENSLLRQENDKLRAENMSMREAMRNPICSNCGGPAMIGEISLEEQHLRIENARLKDELDRVCALAGKFLGRPISSLTGSIGPPMPNSSLELGVGSNGFGGLSTVPSTMPDFGVGISSPLAMVSPSSTRPTTTALVTPSGFDNRSIERSIVLELALAAMDELVKMAQTGEPLWMRSLEGGREILNNEEYTRTITPCIGLRPNGFVTEASRQTGMVIINSLALVETLMDSNRWSEMFPCMIARTSTTEVISSGINGTRNGALQLMHAELQVLSPLVPVREVNFLRFCKQHAEGLWAVVDVSIDTIRETSGAPTFVNCRRLPSGCVVQDMPNGYSKVTWVEHAEYDESQIHQLFRPLLSSGMGFGAQRWVTTLQRQCECLAILMSSAAPSREHSAISSGGRRSMLKLAHRMTNNFCSGVCASTVHKWNKLNAGNVGEDVRVMTRKSVDDPGEPPGIVLSAATSVWLPVSSQRLFDFLRDERLRSEWDILSNGGPMQEMAHIAKGQDHANCVSLLRASAINANQSSMLILQETCTDASGSLVVYAPVDIPAMHVVMNGGDSAYVALLPSGFAIVPDGSVEENGGASQQRAASGGCLLTVAFQILVNSLPTAKLTVESVETVNNLISCTVQKIKSALHCES

SEQ ID NO: 31530 - protein, 282 aa, Glycine max
  Clone ID: TF_GmC1282_1.pep
KDAPAYELLSEDEDWGPGKRKRREKESDAVDSLMTLHESENRHPNNEHNMTSKDSSSIKIKRHCFRIPRDAVERLRQVFAENELPPRSIREGLSKELGLDTEKVSKWFKNARYLALKNRKHQAEGVADQLQSITSTKNRLQKQENVDPLKSKTPKITRTHSQKDVKNVNGRKKMKSSNKKRQPEIPPPPGENGKKDFMEISDDVSLKKLLKKRKKRLINFTFGGDSQLAELEFERLSELKTKVDSMKQKLTAIQNYRVKGSPYSNEPSIVYVPTAVLREKVE

SEQ ID NO: 31531 - protein, 219 aa, Glycine max
  Clone ID: TF_GmC6828_1.pep
MEAEHHHQTSNAGGIIGGLYVKVMTDDQMELLRQQISVYATICQQLVEMHKAVTIQQDLAGLRLGNLYCDPLMACSGHKITARQRWTPTPLQLQVLERIFDEGNGTPSKQKIKDITIELGQHGQISETNVYNWFQNRRARSKRKQLTPALNVVEPEVETEVEVESPKEKKTRAEGFQVQPYEKSSPHRIKDMYIQSPDIGFDQLMSKIEVAGCYSSYFL

SEQ ID NO: 31532 - protein, 109 aa, Glycine max
  Clone ID: TF_GmC294_2.pep
MEYSQYTTYSAEGVEAETYTSSCTTPSRSKKRNNNNTRRFSDEQIKSLETMFESETRLEPRKKLQLARELGLQPRQVAIWFQNKRARWKSKQLERDYAILQSNYNTFAS

SEQ ID NO: 31533 - protein, 250 aa, Glycine max
  Clone ID: TF_GmC776238_1.pep
MEDNNEECIAGLCLGLGLGLGSGHVPKKNKQKENKAVVCLDLAFELCPKGEKAVNNVNHHHDKVERISLERIHDYPNEKSTDSDNSNNNGCRKKLRLSKDQSSMLENSFKQHSTLNPVLIHALAARLNLKTRQVEVWFQNRRARTKLKQTEVDRELLKKHCQNLSDENKRLKKELQELRATKGWTVATMHSTIQTGDPDNVGFFLRSRVMSCRFCSCPWGVGRRCVCGWFWVPSGRSQDLTRASSTGYNT

SEQ ID NO: 31534 - protein, 243 aa, Glycine max
  Clone ID: TF_GmC722_2.pep
MMEGDENIQASSKGKYVESFNCSEAPRKKSKKIENKRRFSDEQIRSLECIFESESKLEPRKKMQLARDLGLQPRQVAIWFQNRRARWKSKRIEQEYRKLKDEYDNLASRFESLKKEKDSLQLEKLSDLLEACQDDGREDKAGKENSIEDGGSGSGYSSWKPEAKPRFSNEGLEERIGVYSDDQNENSIIRGGEKSEDKGHQLLRMDDHAEMPLASLEKWYSGVDPSGILDQSCSSSQWLDFWT

SEQ ID NO: 31535 - protein, 201 aa, Glycine max
  Clone ID: TF_GmC4674_2.pep
EDGAATRKKLRLKRERDLSCEEVVDAKEIDQRDLSCEGIIRATEEEEDGAATRKKLRLTKEQSALLEESFKQHSTLNPKQKQALSKQLNLRPRQVEVWFQNRRARTKLKQTEVDCEFLKKCCETLTDENRRLQKELQELKALKLAQPLYMPMPAATLAMCPSCERLGGSAVNGAGGSPKTSFSMAPKPHFFNPFANPSAAC

SEQ ID NO: 31536 - protein, 207 aa, Glycine max
  Clone ID: TF_LIB4280-016-R1-K1-E12.pep
MSFGGFLDDKSGSGGARINNFSDIPYNNNNVTNTTTTNNNNNDRMPFGAISQPRLVTTTPTLAKSMFNSPGLSLALQTSIDGQEDVNRMAENSFEPNGLRRSREDEHESRSGSDNMDGGSGDEHDAADNPPRKKRYHRHTPQQIQELEALFKECPHPDEKQRLELSRRLCLETRQVKFWFQNRRTQMKTQLERHENTLLRQEKRQLR

SEQ ID NO: 31537 - protein, 853 aa, Glycine max
  unsure (1)..(853): unsure at all Xaa locations
  Clone ID: TF_GmC13446_1.pep
MALSMHKDSANNQMDSSKYVRYTPEQVEALERVYAECPKPSSLRRQQLIRECPILSNIEPKQIKVWFQNRRCREKQRKEASRLQTVNRKLTAMNKLLMEENDRLQKQVSHLVYENGYMKQQIHTASAGTTTDNSCESVEMSGHNQQQRXPTPKDPNREANNPAGLFVCFSLLAIAEETLAEFLSKATGTAVDWVQMIGMKPGPDSIGIVAVSRNCSGVAARACGLVSLEPTKVAEILKDRQSWYRDCRCVDVLSIVPTGNGGTIELLYMQTYAPTTLAAARDFWTLRYTTSLEDGSLVICERSLTSSTGGPTGPPSTTFVRAEMLPSGFLVRSCEGGGSIIHIVDHIDLDVWSVPEVLRPLYESSKFLAQKLTTAALQHIRQIAQESSGEVHYGGGRQPAVLRTFSQRLCKGFNDAVNGFVDDGWSLMGNDGVEDVTIAINSSPNKFLGSNYNASMFPAFGGGVLCAKASMLLQNVPPALLVRFLREHRSEWADYGVDAYSAACLKASPYAVPCARPGGFPSTQVILPLAHTIEHEEFLEVVRIEGHAFSPEDVAMARDMYLLQLCSGVDESAVGACAQLVFAPIDESFADDALLLPSGFRVIPLDPKSDGPAPTRTLDLASTMEVGSGNARPAGEADLNGYNLRSVLTIAFQFTFENHTRDNVAAMARQYVRSVVGSVQRVAMAIAPSRLNTQLAPKSLPGSPEALTLARWIFRSYRVHTGTELFKAESTAGDAIFKQLWHHPDAIICCSVKTNASPVFTFSNQAGLDMLETTLVSLQDIMLDKVLDESGRKILCSEFSKIMQQGFASLPAGICVSSMNRPVSYEQVVAWKVLNDDDSNHCLAFMFINWSFV

SEQ ID NO: 31538 - protein, 213 aa, Glycine max
  unsure (1)..(213): unsure at all Xaa locations
  Clone ID: TF_GmC13446_2.pep
MALSMHKDSANNQMDSSKYVRYTPEQVEALERVYAECPKPSSLRRQQLIRECPILSNIEPKQIKVWFQNRRCREKQRKEASRLQTVNRKLTAMNKLLMEENDRLQKQVSHLVYENGYMKQQIHTASAGTTTDNSCESVVMSGQNQQQNPTPQHPNRDANNPAGLLXIAEETLXSSTGTAVDWVQMIGMKPGPDSSYPHVAWQRACSLSLEPST

SEQ ID NO: 31539 - protein, 329 aa, Glycine max
  Clone ID: TF_GmC221_1.pep
MAASGSSFSNITSFLRNQQPSSQPLDSSLFLSAPSIFVSGSRSMVSFEAEGGKGCNGSFFRAFDMDDNGDECMDEYFHKPEKKRRLSMNQVQFLEKSFEEENKLEPERKTKLAKDLGLRPRQVAIWFQNRRARWKTKTLEKDYEALHASFENLKSNYDSLLKEKDNLKAEVASLNEKVLARGKQEGHMKQQAESEEETKRLLHLQEQEPPQRLLLESVSEGEGSKVSSVVGGCKQEDISSARSDILDSDSPHYTDGVNSALLEHGDSSYVFEHDQSDMSQDEEDNLSKSLYPSYLFPKLEEDVDYSDPPESSCNFGFSEEDHALWTWAY

SEQ ID NO: 31540 - protein, 278 aa, Glycine max
  Clone ID: TF_701009968_FLI.pep
MLEGLDEEGCVEEAGHHSEKKRRLNVDQVKALEKNFEVENKLEPDRKVKLAQELGLQPRQVAVWFQNRRARWKTKQLERDYGVLKANYGSLKLNFDTLQQDNEALLKQIKELKSRLVQEENNNNTESDVSVKEEMIATLQDSNPLCESAIPGSDSKELSYECFNKSDEVGGGSVFPVDFKDGSSDSDSSAILNEENNNHSPNNNAAISSCGVLQSHGLLSSPSSSSMNNCFQFQKQYQTTTQYVKMEEHNFLSADEACNFFSDEQAPTLQWYCSEEWS

SEQ ID NO: 31541 - protein, 846 aa, Glycine max
  Clone ID: TF_GmC556_1.pep
RFDLDVESMSCKDGSRNGIGMDNGKYVRYTPEQVEALERLYHDCPKPSSIRRQQLIRECPILSNIEPKQIKVWFQNRRCREKQRKESSRLQAVNRKLTAMNKLLMEENDRLQKQVSQLVYENGYFRQHTQITTQATKDTNCESVVTSGQQHNLITQHPPRDASPAGLLSIAEETLAEFLSKATGTAVEWVQMPGMKPGPDSIGIVAISHGCTGVAARACGLVGLEPTRVAEILKDRPLWFRDCRAVDVLNVLPTANGGTIELLYMQLYAPTTLAPARDFWLLRYTSVLEDGSLVICERSLKNTQNGPSMPPVQHFVRAEMLPSGYLIRPCEGGGSIIHIVDHMDLEPWSVPEVLRPLYESSTVLAQKTTMAALRHLRQISHEVSQSNVTGWGRRPAALRALSQRLSRGFNEALNGFTDEGWTTIGNDGVDDVTILVNSSPDKLMGLNLSFANGFPSVSNAVLCAKASMLLQNVPPAILLRFLREHRSEWADNNMDAYTAAAIKVGPCSLSGSRVGNYGGQVILPLAHTIEHEEFLEVIKLEGIAHSPEDTIMPREMFLLQLCSGMDENAVGTCAELISAPIDASFADDAPLLPSGFRIIPLESGKEASSPNRTLDLASALDVGPSGNRASNGCANSSCMRSVMTIAFEFAFESHMQEHVASMARQYVRSIISSVQRVALALSPSHLSSHAGLRSPLGTPEAQTLAHWICNSYRCYLGVELLKSNNEGNESLLKSLWHHSDAILCCTLKALPVFTFSNQAGLDMLETTLVALQDITLEKIFDDHGRKILFSEFPQIIQQGFACLQGGICLSSMGRPVSYERVVAWKVLNEEENAHCICFMFMNWSFV

SEQ ID NO: 31542 - protein, 95 aa, Glycine max
  Clone ID: TF_GmC556_10.pep
SMSCKDGSRNGIGMDNGKYVRYTPEQVEALERLYHDCPKPSSIRRQQLIRECPILSNIEPKQIKVWFQNRRCREKQRKESSRLQAVNRKLTAMNK

SEQ ID NO: 31543 - protein, 241 aa, Glycine max
  Clone ID: TF_GmC556_9.pep
MSCKDGSRNGIGMDNGKYVRYTPEQVEALERLYHDCPKPSSIRRQQLIRECPILSNIEPKQIKVWFQNRRCREKQRKEVVTAARRRQKGGIVAISHSCTGVAARACGLVGLEPTRVAEILKDRPLWFQDCRAVDVLNVLPTANGGTIELLYMQLYAPTTLAPARDFWLLRYTSVLEDGSLVICERSLKNTQNGPSMPPVQHFVRAEMLPSGYLIRPCEGGGSIIHIVDHMNLEPWSVPEVL

SEQ ID NO: 31544 - protein, 299 aa, Glycine max
  Clone ID: TF_GmC5011_1.pep
MMVQKEDLGLSLSLNFPHHNTPNPQHPSLMSSSTHSSSPSGCNPQKPSWNEAFTSSDRNSDTCRGETRSFLRGIDVNRLPSAVDTEEETGVSSPNSTVSSVSGKRSEREEPNGEEHDMDRACSRGISDEEDAETARKKLRLSKDQSAILEESFKEHNTLNPKQKLALAKQLGLRPRQVEVWFQNRRARTKLKQTEVDCEVLKRCCENLTEENRRLQKEVQELRALKLSPQFYMQMTPPTTLTMCPSCERVAVPSSAVDAATRHHPMAQAQAQAQIRHRPIGPWASASPITHRPFDVFHH

SEQ ID NO: 31545 - protein, 238 aa, Glycine max
  Clone ID: TF_GmC294_1.pep
MEYTYSAGVEAETHTSSSTTPSRSKKRNNNTRRFSDEQIKSLETMFESESRLEPRKKLQLARELGLQPRQVAIWFQNKRARWKSKQLERDYGILQSNYNSLASRFEALKKENQTLLIQLQKLNHLMQKPMEPGQRCTQVEAANSMDSESENGGTMKCEAEGKPSPSMEISEHLLGVLSDDDTSIKVEDFGLEDEHGLLNFAKHVDGSLTSPEDWNAFESNDLLGQSTTDDYQWWDFWS

SEQ ID NO: 31546 - protein, 218 aa, Glycine max
  Clone ID: TF_GmC1605_1.pep
MDWHHGTKPLVPRPETLSFFYNYNYNSPYPGVEVKQAALMETGEGSVPALMDSRNKEKKKRLTNNQIELLERSFQEEIKLDPERKMKLSRELGLQPRQIAVWFQNRRTRWKTKQLEHLYDVLKHQYDVVSNEKQKLQEEVMKLKAMLSKEQGFGKQTFGCYTEISGEETVESTSEGLTLRGKSNIEHVADQGYCSFTVEDYNTTVLLPPHCHWPAVPY

SEQ ID NO: 31547 - protein, 291 aa, Glycine max
  Clone ID: TF_GmC6963_1.pep
MGEKDDDFGLSLSLSLGRVNQQQQHPPPLNHMHQPQQLQPVPMNHNKTLFGDLSQLPDRSSEMIRGIDVNSAAECDGVSSPNSAVSSVSGGDGKQSERDDDNNAAAVAGERTSCSRGSDDDDGGGSDASRKKLRLTKEQSMVLEETFKEHSTLNPKRKQALAEELNLKPRQVEVWFQNRRARTKLKQTEVDCEYLKRCYENLTEENRRLHKEVQELRALKLSPQMYMHMNPPTTLTICPSCERTHSFASSSTATIHSAVAATSSNRKLFGTNIRLPVSFNTRPFEGPIPRP

SEQ ID NO: 31548 - protein, 240 aa, Glycine max
  Clone ID: TF_GmC53_4.pep
LAFFSSIYAFFYYYCRKVGAPPELASLLEEIARESYPTDALREIGDDPELDEFMESYCEVLHRYKQELSKPFNEATLFLCSIESQLSNLCKGTLTMPLDNNHSDEAAGTSEDELSWEKVEAVEGHESSGPRPGDQELKEMLLRKYGGYLSSLKKEFLKKRKKGKLPKDARMVLMDWWNTHYRWPYPTEEEKVQLSEMTGLDQKQINNWFINQRKRHWKPSEDMRFAIMDGVSGSGFGGPI

SEQ ID NO: 31549 - protein, 202 aa, Glycine max
  unsure (1)..(202): unsure at all Xaa locations
  Clone ID: TF_GmC189414_1.pep
KHTKHSYTSEVWFWEARMYGDCQVMSSMGGNVVVNPDTLFSSSIQNSSFNXIPTMPFQPFPSMKEEDGILRGKEEIESGSGSEQLVEDKSGNEQESHEQPTKKKRYHRHTARQIQEMEALFKECPHPDDKQRLKLSHELGLKPRQVKFWFQNRRTQMKAQQDRADNVILRAENESLKSENYXLQAALRNVICPNCVAMHNGC

SEQ ID NO: 31550 - protein, 343 aa, Glycine max
  Clone ID: TF_GmC1705_2.pep
NSSTLIGSTFSLSKLSHLSALPFNLFTSDTLLILLPVPLSGSKSVVDFENVNGSRVTDRPFFQALEKEENCDEDYEGCFHQPVKKRRLTSEQVQFLERNFEAHDKLEPERKVQLAKELGLQPRQVAIWFQNRRARFKTKQLEKDYGVLKASYDRLKSDYESLVQENDKLKAEVNSLESKLILRDKEKEENSDDKSSPDDAVNSSPHNNKEPIMDLLISKNATTSENGTEVSTLPLPIMVTCKQEDANSAKSDVLDSDSPHCTDYGNHPSSFVEPADSSHAFEPEDHSEDFSQDEEDNLSENFLTLPSSCCLPKVEEPCYDDPPENSCNFGFHVEDQTFCFWPY

SEQ ID NO: 31551 - protein, 229 aa, Glycine max
  Clone ID: TF_GmC4807_1.pep
RASERARNVTYHTTLNHRPPFQDHMMLMSQLFPADAYTQIISQQGETNKKPRRRRNKQHREDERRGSLVMKKWKLSEVQVNLLEQNFGNERKLESERKDRLAMELGLDPRQVAVWFQNRRARWKNKKLEEEYSSLKKNHEATLLEKCCLESEVLKLKEQLSEAEKEIQRLLESAERVPSNSSSSSQSQSMEAVDPPFFGEFGVDGYEDDVFYVPETHYINGMEWINLYM

SEQ ID NO: 31552 - protein, 150 aa, Glycine max
  unsure (1)..(150): unsure at all Xaa locations
  Clone ID: TF_GmC1455_1.pep
SPDSTNSNNGSRKKLKLTKEQSATLEDIFKLHSSLNPAQKQALAEQLNYXHRRVEVWFQNRRARTKLKQTEVDCEFLKKCCEKLTDENLRLKKELQELRAQKLGSTPLYIQLSKATTLTICSSCEKLLKPNEGNKGAINKLQNSIELGGI

SEQ ID NO: 31553 - protein, 466 aa, Glycine max
  unsure (1)..(466): unsure at all Xaa locations
  Clone ID: TF_GmC1443_1.pep
MEGEACSEGENNLKRGGSDDDSNENNNNNNNGSSGKIVNSNEGQSKPKRQMKTPFQLETLEKAYAVDNYPSETMRVELSEKLGLSDRQLQMWFCHRRLKDKKDLPSKKPPRKVLAEPLPDSPRDDPRLSLELANEYGSGSGSGSSPYARVEPLNVVPRCVPGYYESPQAKLELRAIACVEAQLGEPLRDDGPILGLEFDPLPPXCFGAPIAAVTEQQKLPSFAYDSKIYERHDARTNKALARTFRDNQFLPNKSGIRSDASGQFSQSHLHDPIEGFVRNPPFAHGNEHLPRIHATKGHSSRVRLLSQQDKQLIPYQSPSRDDDAAPQRELYPNIANAGKNSHSTGHQIVGPENLHALPSVQVLHNNATWIEKKRKSDDAHDVEAHEMKIRKELEKQDNLRRKSEERTRKEMERQDRERKKEEERLMRERQREEERARREQKREMERREKFLLKENLQAEKTRQREK

SEQ ID NO: 31554 - protein, 102 aa, Glycine max
  Clone ID: TF_LIB3242-123-Q1-J1-B9.pep
METGERSVPAMDRGNKEKKKRLTNNQIELLERSFQEEIKLDPERKMKLSRELGLQPRQIAVWFQNRRTRWKAKQLEHLYDMLKHQYDVVSNEKQKLQEKLLS

SEQ ID NO: 31555 - protein, 201 aa, Glycine max
  unsure (1)..(201): unsure at all Xaa locations
  Clone ID: TF_GmC1517_1.pep
MGDFIFSFKTQPQDHAHHQRAKHNNNNNKRLTEDQVAILEKCFASNMKLEPEQKFHLANQLGVPPRQVAIWYQNKRARWKTQSLEVDHGVLQARLENVVAEKKQLEKDVERLKAELKKAQEMLLITNNVKSXTNNNNNASCEFSTSFEEGGSSGVVLDDATHHHHHECWQSGGEVMQVEELYAYFVGANYGTGLHEKGHKI

SEQ ID NO: 31556 - protein, 287 aa, Glycine max
  unsure (1)..(287): unsure at all Xaa locations
  Clone ID: TF_GmC357_3.pep
HASAVQKEDLGLSLSLSFPLLSSSPSSHNPQKPSWNDPIFTSSGEAGSFLRGIDVNRLPSVVDCEEEAGVSSPNSTVSSVSGKRSERETNGEENDTDRACSRGIISDEEDAETSRKKLRLSKDQSIVLEESFKEHNTLNPKQKLALAKQLGLRARQVEVWFQNRRARTKLKQTEVDCEFLKRCCENLTEENRRLQKEVQELRALKLSPQFYMHMTPPTTLTMCPSCERVXVPPSSAVDPATRHHHVPPSHPRAFPIGXHGQALRCPPSQILDSRKQNDKIEKKDRKP

SEQ ID NO: 31557 - protein, 312 aa, Glycine max
  Clone ID: TF_GmC4674_1.pep
MMGLDQDASSNSGLHLILGLALTATTTTTPSLPSISNKLDHVDHHHHLITLRPTTKSPYNSSEAEPSLTLGLSRESYLKVPKNIIGQNSNNKVSSCDDPLDHLSTQTNSPHHSAVSSFSSGRVKRERDLSCEEVVDATEIDQRDHSCEGIVRATDEDEDGTAARKKLRLSKEQSALLEESFKQHSTLNPKQKQALAKQLNLRPRQVEVWFQNRRARTKLKQTEVDCEFLKKCCETLTDENRRLQKELQELKALKLAQPLYMPMPAATLTMCPSCERLGGGINGGGGGSPKTPFSMAPKPHFFNPFANPSAAC

SEQ ID NO: 31558 - protein, 192 aa, Glycine max
  Clone ID: TF_uC-gmflLIB3275P163e04b1.pep
MFQPNLMDALEMGQNTSESEVPRILEDEFDSATKSGSENHEGASGEDQDPRPNKKKRYHRHTQHQIQEMEAFFKECPHPDDKQRKELSRELGLEPLQVKFWFQNKRTQMKTQHERHENTNLRTENEKLRADNMRYREALSNASCPNCGGPTAIGEMSFDEHHLRLENARLREEIDRISAIAAKYVGEARGEL

SEQ ID NO: 31559 - protein, 842 aa, Glycine max
  Clone ID: TF_GmC571_1.pep
MAMVVAQHRESSSSGSIDKHLDSGKYVRYTAEQVEALERVYAECPKPSSLRRQQLIRECPILSNIEPKQIKVWFQNRRCREKQRKEASRLQTVNRKLTAMNKLLMEENDRLQKQVSQLVCENGFMRQQLHTPSATTTDASCDSVVTTPQHTLRDASNPAGLLSIAEETLTEFLSKATGTAVDWVQMPGMKPGPDSVGIFAISQSCSGVAARACGLVSLEPTKIAEILKDRPSWFRDCRSLEVFTMFPAGNGGTIELVYTQTYAPTTLAPARDFWTLRYTTSLENGSLVVCERSLSGSGTGPNPAAAAQFVRAETLPSGYLIRPCEGGGSIIHIVDHLNLEAWSVPEVLRPLYESSKVVAQKMTIAALRYIRQIAQETSGEVVYGLGRQPAVLRTFSQRLSRGFNDAVNGFNDDGWTVLNCDGAEDVIIAVNSTKNLSGTSNPASSLTFLGGILCAKASMLLQNVPPAVLVRFLREHRSEWADFNVDAYSAASLKAGTYAYPGMRPTRFTGSQIIMPLGHTIEHEEMLEVIRLEGHSLAQEDAFVSRDIHLLQICSGIDENAVGACSELVFAPIDEMFPDDAPLVPSGFRIIPLDSKPGDKKDAVATNRTLDLTSGFEVGPATTAGADASSSQNTRSVLTIAFQFPFDSSLQDNVAVMARQYVRSVISSVQRVAMAISPSGINPSIGAKLSPGSPEAVTLAHWICQSYSYYLGSDLLRSDSLVGDMMLKQLWHHQDAILCCSLKSLPVFIFANQAGLDMLETTLVALQDITLDKIFDEAGRKALCTDFAKLMEQGFAYLPAGICMSTMGRHVSYDQAIAWKVLTGEDNTVHCLAFSFINWSFV

SEQ ID NO: 31560 - protein, 61 aa, Glycine max
  Clone ID: TF_GmC114_3.pep
MLQQRSVPAPFLTKTYQLVEDPGTDEVISWGESGNTFVVWKHADFAKDLLPKYFKHNNFSS

SEQ ID NO: 31561 - protein, 120 aa, Glycine max
  unsure (1)..(120): unsure at all Xaa locations
  Clone ID: TF_LIB3242-385-Q1-J1-H5.pep
MVKSNENGAVYAYVPTDLKTCYELVGERATDSIIPWSDGGDMVTLLRXTHLYDTLLPTYCRHNSFSSFVRQLSIYGSRRIESDCYXLARENIVRCQKHMMKTIRRKTHSHNTDQQKALPL

SEQ ID NO: 31562 - protein, 179 aa, Glycine max
  Clone ID: TF_uC-gmflLIB3275P163e11b1.pep
IKGFRKVVPDRWEFANDCFRRGERALLRDIQRRKLLPVPPAAAAPAAVTANTVTVAVAAPAVRTVSPTTSGDEQVLSSNSSPIAGNNNNNTVHRTTSCTTAPELLEENERLRKENIQLSNELSQLKGLCNNILSLMTNYASGFSRQQLESSTSAVRTVPGPDGKAPVELLPAKHVSSAD

SEQ ID NO: 31563 - protein, 53 aa, Glycine max
  Clone ID: TF_GmC1369_2.pep
PHAFSRDLLPRYFKHNNFSSFVRQLNTYVAAVAWTRIYGSDSNRYLLKIIQKP

SEQ ID NO: 31564 - protein, 278 aa, Glycine max
  unsure (1)..(278): unsure at all Xaa locations
  Clone ID: TF_GmC1369_1.pep
GFRKIDPDRWEFANEGFLRGHRHLLANIRRRKQPSSQPSSSSSSSSYYYYSSSSQQAQQGHCVEVGRFGLDEEIDRLRRDKHVLMMELVKLRQQQQNXRSYLQAMEERLRGTEIKQQQMMAFLARALKNPTFIQQLLQQKEKRKELEEAMSKKRRRPIERGPNHGVVGEESSSVKVESLVFGDEYGFGVSELEVLAMEMQGYGKGRREQEEEPDEALDQSQERLEKELDEGFWEELFSEGFEGELDTNPTNSQDQDEEEEDHVNVLANRFGYLGSSPK

SEQ ID NO: 31565 - protein, 490 aa, Glycine max
  Clone ID: TF_GmC1855_1.pep
MDGGGSTPAAPIPNANAPPPFLSKTYDMVEDPSTDAIVSWSATNNSFIVWDPPQFARDLLPKYFKHNNFSSFVRQLNTYGFRKVDPDRWEFANEGFLKGQKHLLRSITRRKPAHGQNHQQPQQPHGQSSSVGACVEVGKFGLEEEVERLKRDKNVLMQELVRLRQQQQTTDNQLQTMVQRLQGMEQRQQQMMSFLAKAVQSPGFFAQFVQQQNDSNRRITEVNKKRRLKQEGMAETEHAATPDGQIIKYQPMVNEAAKAMLRQIMKWDTSCVESLNKNSDNYVIGDASSSSSGMDSSSSSGWTSGVTLKEVSPASVQSSHVPAATGTQGHVPSTVKPEILSVPQAVASEKVMKDGAHDPPSIPVSQADVMIPDLPPITEMVTGNILDIPEENYMATETDEGYMDSSLGAGGSFPIDFEGISPDADIDDLLANPIWDEILQTSVPEDIDTNVAEASKGNEVQPMENGWGKTQHMDHLTEQMGLLSSDAKRV

SEQ ID NO: 31566 - protein, 154 aa, Glycine max
  unsure (1)..(154): unsure at all Xaa locations
  Clone ID: TF_jC-gmXLIB3563P087Cb01a1.pep
MVPAPFLTNTYDVLERSQXTDQAIXSCGESDNTFLXAWKHADFAXDWLAKYFXHNILSYYGRQRKSLYXFLDIVPDKWEFSNEHFWRGLNDLLSEIKRQMTEPDSCXHPTEAXKSGEGCIYHVNSGSDDXGSTLTWSSFSGSMIQGSEETLTTA

SEQ ID NO: 31567 - protein, 151 aa, Glycine max
  Clone ID: TF_uC-gmropic020d07b1.pep
GCVGGNNSPSPKPLEMVNPVPPILSKTFDLVDAPTLDPIISWNSTGLSFVVWDPLEFARIVLPRHFKYNNFSSFVRQLNTYGFRKIDTDKWEFFNEAFQRGKKHLLKNIQRRRSSQSQPVGSYIGIGSSTEAGGSEVEIEIERLRKEKTML

SEQ ID NO: 31568 - protein, 404 aa, Glycine max
  Clone ID: TF_GmC2149_1.pep
MGGEEVARVKAELFDDNESDRNDDDVLSESKDSGVTTAHAVKEEMDDGAANWSSSSSTSPKPMEGLHEVGPPPFLKKTFEMVEDPHTNPIVSWSQTRHSFVVWDSHEFSKTLLPKYFKHSNFSSFVRQLNTYGFRKVDSDRWEFANEGFQGGKKHLLKNIRRRSKCNKLHQGAFNMMKPDVDSEVEKLKKDQNILKVEILKLRQQQENSHVQLTNVQERIRCAEMKQFQMMYFLTRMARRPAFVEQLVHKIRRKREIDGNDMVKRPRLMGNPCHVPFPKTMETTPNFDYRHQQGHKQFATLQSELNVTEVNSSRMEHPTPSPLEDELGNSLQGLRAHGCSRARAQDASSSAYHVMSEKLMRENSIVDEELDVNDSNIYLELEDLITKPTDWSVGSASGLVEQTS

SEQ ID NO: 31569 - protein, 362 aa, Glycine max
  Clone ID: TF_GmC1045_1.pep
PAKIPIDLRLLFHGSTAAGGTQRRLRHYRLSIRLRAAESQRSIPTPFLTKTFQLVDDQSIDDVISWNDDGSTFIVWNPTVFARDLLPKYFKHNNFSSFVRQLNTYGFRKVVPDRWEFSNDYFRRGEKRLLCEIQRRKISSPAPSPTAPTTVTVPMPLTAIPIISPSNSGEEQVISSNSSPLRAPAELLDENERLRKENVQLTKELAEMRSLCNNIYSLMSSYGNKNGNSNGSYQTDGGAGGAQGSRESGMTAVKPLDLMPVKRSSGEDAADTVPKEINLIPNPKLFGVAIGAKRAREGGGGSGSGRDCGGGGGGGEEDTLLRLHHVGSADVKSEPLDCQNHRENQETPWLSPCHRTNQRVCN

SEQ ID NO: 31570 - protein, 454 aa, Glycine max
  Clone ID: TF_GmC688_2.pep
MNPNDANSPKPLEILQMNPVPPFLSKTFDLVDDPTLDPIISWGSTGFSFVVWDPLEFARIVLPRHFKHNNFSSFVRQLNTYGFRKIDTDKWEFFNEAFQRGKKHLLKNIQRRRSSQSQQVGSYIGIECSTEAGRSDVEIEIERLRKERTMLMEEVVDLKQEQRRMAHRAGEVNQRLQSTEQRQKQMVSFLVKLIQNPAFLARLRHEEQKEIDSPRVVRKFVKQHQHETGTAETLQEGQIVRYQHDWRNIGMSSETPKLSPVSIEQSPHYLSQGLAGEVSVGAEDLTAQIENIVSNDLAAVHGITVSQEIMIGEGLSSFGAEDPLFKGKSVMSPILEVPPEYFASFPEGLTKGKDFQDFSALGTEGMIKLEDIWDSGLNVSGAASGSGNELWSNHVNYEEFPEFGVTSGMSDSDIWDIGLGSLGIDKWPTDEPSLGETNGQAGQPKEDRPKNFGP

SEQ ID NO: 31571 - protein, 112 aa, Glycine max
  unsure (1)..(112): unsure at all Xaa locations
  Clone ID: TF_jC-gmro02910062b09a1.pep
ELKSGKGFRKVDPDRWEFANEGFLRGEKQLLKSISRRKSAHVNGSQQPSQVHKSAVRACVEVGKFGFEEEVERLKRDKNVLMXELXRLRQKQQGTDNHLKMLATCAVNEQRQ

SEQ ID NO: 31572 - protein, 93 aa, Glycine max
  Clone ID: TF_GmC12036_2.pep
MDGAPQSAGAGGPAPFLLKTYDMVDDASTNDIVSWSSTNNSFVVWNPPEFARLLLPTYFKHNNFSSFIRQLNTYVSFSIPLFRLRIHGALPSF

SEQ ID NO: 31573 - protein, 326 aa, Glycine max
  Clone ID: TF_GmC5651_2.pep
ARAESARGEDDTTFVVWRPPEFARDLLPNYFKHNNFSSFVRQLNTYGFRKIVPDRWEFANEFFKKGEKHLLCEIHRRKTAQPQQGIMNHHHHHAHSPLGVNVNVPTFFPFSSRVSISTSNDSDDQSNWCDSPPRGATSLVNGAAAANYNTSVTALSEDNERLRRSNNMLMSELAHMKKLYNDIIYFVQNHVKPVAPSNSYSSSLLLCNTPSATPISSANNVSMMQRPMNQLLGYYSTNPKQGATQITQPQTYVVNSPTNTSRSSITIFEGPASSNINSCKTKLFGVSLQSKKRVHPDCGSNPETNRARLVLEKDDLGLNLMPPSTC

SEQ ID NO: 31574 - protein, 392 aa, Glycine max
  Clone ID: TF_GmC790_1.pep
MMEEAQGSSSSLPPFLTKIYEMVDDPSTNSIVSWSATNRSFIVWNPPEFSRDLLPKYFKHNNFSSFIRQLNTYGFRKIDPEQWEFANDDFVRGQPHLLKNIHRRKPVHSHSLQNIQGQGVSSLTESERQSFKDEIEKLKHEKEQLLRELEMHEQEWKMYEVQLQHSNDRLEKLEKKQENLVSSVSQVLQKPGIALNLLLLTENMDRKRRLPRSGLFSDDASIEDHMETSQVLPRENADGASIFSSSTERLDLLESSMTFWENITHDVGDVFVQSHLNLDFDESTSCADSPAISCVQLEVEDQPKSHGINVNSEPAVVAAPDLDASKEQPVETAPLTTGVNDIFWERFLTENPGSSEMQEAQSEREDSDGRSNAKFWWNIRNVNNPPEQMGHS

SEQ ID NO: 31575 - protein, 460 aa, Glycine max
  Clone ID: TF_GmC688_3.pep
MNPNDGNNSPSPKPLEMVNPVPPFLSKTFDLVDAPTLDPIISWNSTGLSFVVWDPLEFARIVLPRHFKHNNFSSFVRQLNTYGFRKIDTDKWEFFNEAFQRGKKHLLKNIQRRRSSQSQPVGSYIGIGSSTEAGGSEVEIEIERLRKEKTMLMEEVVDLQQEQRRTAHHAGEVNLRLQSAEQRQKQMVSFLAKLIQNPAFLARLRHKKEQKEIDSPRVVRKFVKQHHETGTTTTAETLQEGQIVRYQPDWRNIAMSSETPKLSSVSIEQSPHYLSQGLAGEMSVVGAEDLTAQIDNIVSDDLAAVHRITPSQEMMIGEGSSTFGAEDPLFKGKSVMSPILEVPPEYFPSFPEGLTKEKKDFQDFSALGTEGMIKLEDIWDSGLNVSGAALSSGNELWGNHVNYEEFPQFGVTSGMSDSDIWDIGLGSFGIDTWPTDEPSLGETDGQSGQPNEDRSKNFDP

SEQ ID NO: 31576 - protein, 328 aa, Glycine max
  Clone ID: TF_GmC1242_1.pep
MLSSHSPPPPPPSFSTTTSTTTTTFTSSPCPRRIYLNNPTQIPKPYPYTHLFTHHSSLLNNYFTNMNPSCRFSSTKHTPFLHNSKPTSPFFLRHSHSHSHQVKPFPLSPPITTTTAKPYPLNILRLRNIKLSHPLATLSSFAEGEEENQKEGAESPPNNDELGGIAKAFNISSRTASAISICMALAVLTFPLFMTSLGQGMALKTKVLSYATLLFGFYMAWNIGANDVANAMGTSVGSGALTLRQAVLTAAVLEFSGALMMGTHVTSTMQKGILVANVFNGKDSLLFAGLLSSLAAAGTWLQFASYYGWPVSTTHCIVGAMVGFGLAY

SEQ ID NO: 31577 - protein, 338 aa, Glycine max
  Clone ID: TF_GmC1045_2.pep
MAKLPVEYNGDCATTASASASAAAESQRSIPTPFLTKTFQLVDDQSIDDVISWNDDGSTFIVWNPTVFARGLLPKYFKHNNFSSFVRQLNTYGFRKVVPDRWEFSNEYFRRGEKRLLCEIQRRKISSPASSPTAPATVSVTAPMPLTAIPIISPSNSGEEQVTSSNSSPAELLDENERLRKENVQLTKELAEMRSLCNNIYSLMSNYANANGKGNSNGSYKTKGGAGVAHGSLESGMTAVKLLDLMPVMRSSDEDAAEMAPEEMNPKLFGVAIGAKRAREGGGGGDCGGGGEEDTLLRLHHAGSADVKSEPLDFQNHRENQKTPWLSPCYRTNQRVCN

SEQ ID NO: 31578 - protein, 192 aa, Glycine max
  Clone ID: TF_GmC8373_1.pep
MYMERIRVKEEEAVTCGGGSSSSSSSSSSFSPQPMEGLHEVGPPPFLSKIFDMVEDSSTDSIVSWSMARNSFVVWDSHKFSADILPRYFKHGNFSSFIRQLNAYGFRKVDPDRWEFANEGFLAGQRHLLKTIKRRRNVSQSLQQKGGSGACVEVGEFGLEGELERLKRDRNILMAEIVRLRHQQLNSREQLN

SEQ ID NO: 31579 - protein, 358 aa, Glycine max
  unsure (1)..(358): unsure at all Xaa locations
  Clone ID: TF_GmC1242_2.pep
MAPLPAEQTGESAPTELQRSIPTPFLTKTYQLVDDPSADDLISWNEDGTSFIVWRPAEFARDLLPKYFKHNNFSSFVRHLNTYGFRKVVPDRWEFANDCFRRGERALLRDIQRRKLLPVPPAAAAPAAVTANTVTVAVAAPAVRTVSPTTSGDEQVLSSNSSPIAGNNNNNTVHRTTSCTTAPELLEENERLRKENIQLSNELSQLKGLCNNILSLMTNYASGFSRQQLESSTSAVRTVPVPDGKAPLELLPAKXSHVSSADEAGHVGGAAPCATANAGEAEVPKLFGVSIGLKRCRTECEGEAEGEDQNQMQTRAQAQTQTQSSQEPDHGSDVKSEPLDGDDSDDQDHDPRWLELGK

SEQ ID NO: 31580 - protein, 464 aa, Glycine max
  unsure (1)..(464): unsure at all Xaa locations
  Clone ID: TF_GmC688_1.pep
MNPNDANSPKPLEILQMNPVPPFLSKTFDLVDDPTLDPIISWGSTGFSFVVWDPLEFARIVLPRHFKHNNFSSFVRQLNTYSHGAPPGFRKIDTDKWEFFNEAFQRGKKHLLKNIQRRRSSQSQQVGSYIGIECSTEAGRSDVEIEIERLRKERTMLMEEVVDLKQEQRRMAHRAGEVNQRLQSTEQRQKQMVSFLVKLIQNPAFLARLRHEEQKEIDSPRVVRKFVKQHQHETGXNNTAETLQEGQIVRYQPDWRNIAMSSETPKLSSVSIEQSPHYLSQGLAGEMSVVGAEDLTAQIDNIVSDDLAAVHGITPSQEMMIGEGSSTFGAEDPLFKGKSVMSPILEVPPEYFASFPEGLTKGKDFQDFSALGTEGMIKLEDIWDSGLNVSGAALSSGNELWGNHVNYEEFPQFGVTSGMSDSDIWDIGLGSFGIDTWPTDEPSLGETDGQSGQPNEDRSKNFDP

SEQ ID NO: 31581 - protein, 93 aa, Glycine max
  Clone ID: TF_GmC92665_2.pep
MEGTSNKGLLECGRKCTPPPFLLKTYMLVEDPATDDVISWNAKGTAFVVWQPPEFARDLLPTLFKHSNFSSFVRQLNTYVRFGKILHSIRISI

SEQ ID NO: 31582 - protein, 83 aa, Glycine max
  Clone ID: TF_GmC1242_6.pep
MKPLPAEQTGESAPTELQRSIPTPFLTKTYQLVDDPSADDLISWNEDGTSFIVWRPAEFARDLLPKYFKHNNYSSFVRQLNTY

SEQ ID NO: 31583 - protein, 112 aa, Glycine max
  unsure (1)..(112): unsure at all Xaa locations
  Clone ID: TF_jC-gmfl02220076c10a1.pep
ALLLDNCEGILLSXDSHKSEPAPFLTKTYQLVDDPATDHIVSRGEDNTTFAARRPPELERDLVPNYLKHNNFSSXVRQLNTYGSRKIEPDRWEVANEFFQKGEKHLLCQIHK

SEQ ID NO: 31584 - protein, 36 aa, Glycine max
  Clone ID: TF_12689193.pep
WDLLPNYFKHNNFSSYVRQLNTYVCIIHPSCLSSFS

SEQ ID NO: 31585 - protein, 368 aa, Glycine max
  unsure (1)..(368): unsure at all Xaa locations
  Clone ID: TF_GmC5651_1.pep
MALLLDNCESILLSLDTHKSVPAPFLTKTYQLVDDPSTDHIVSWGEDDTTFVVWRPPEFARDLLPNYFKHNNFSSFVRQLNTYGFRKIVPDRWEFANEFFKKGEKNLLCEIHRRKTHHQHHQQVPMNNHHHHHKFGLNVNVPTIFPFHNNRLSVSPSHDSDEVIIPNWCDSPPRGACRCKQQQPTTTRLTATLTAARPNFLGCRCSPRKGCTRIMDLXRDQQGSQNHVKPVAPSNNNNFPSFLLCSDNSNINNNTSPQTQTQAQASPMSKVSTVQRQLKQFVGCYSNNTKQARAVNSPTNSSITIVEEEASSNSCKTKLFGVSLQSKKRVHPEYGSNNVLQSSETNKARLALENDELLGLNLMPPSTC

SEQ ID NO: 31586 - protein, 186 aa, Glycine max
  Clone ID: TF_GmC12036_4.pep
MDGAPQSAGAGGPAPFLLKTYDMVDDASTNDIVSWSSTNNSFVVWNPPEFARLLLPTYFKHNNFSSFIRQLNTYGFRKIHPERWEFANDEFLKDQKHLLKNIYRRKPIHSHSHPPGSLVDPERAAFEEEIDKLSREKTSFESNIYNFKQHQSTAKPKLEDFLQRLDGIEHRQKQLLNFLRGLFRIL

SEQ ID NO: 31587 - protein, 131 aa, Glycine max
  Clone ID: TF_GmC864765_1.pep
MADNYNVLELNIGLGNNNNSKVGGHAGQSPRQRCPAPFLLKTYELLEELSENEKDSTKIVSWNAEGTGFVVWSPAEFSELTLPRYFKHNNFSSFIRQLNTYGCKLLSSYLCELVPGMLQRACWHSLAEGTR

SEQ ID NO: 31588 - protein, 286 aa, Glycine max
  Clone ID: TF_GmC403_2.pep
MSQQQRSMPAPFLTKSYLLVDDPATDDVVSWSEGGNTFVVWKHADFANDLLPKYFKHNNFSSFVRQLNTYGFRKTVPDKWEFANEYFKRGQKDLLAEIKRRKTVSSVSGKSGSGGNISASHSGGDDMGSTSTGSMEAATATVTTTQCADLSGENEKLKKDNEKLSDELARTKKHCDDLVAFLRDSLNVGPDVIDCIIRQGTCGSSNDDAVRFDATENLNNHNHDDDENAVGECEPEQPKGDNGESLKLFGVWLKGQNGKENSIGSCRKRGRQDPIAATAKELKTLV

SEQ ID NO: 31589 - protein, 282 aa, Glycine max
  Clone ID: TF_GmC403_1.pep
MSQQQRSTPAPFLTKTYLLVDDPATDDVVSWSEGGNTFVVWKHADFAKDLLPKYFKHNNFSSFVRQLNTYGFRKTVPDKWEFANEYFKRGQTDLLAEIRRRKVVSPVTGKSTGGGVNISASHSGGDDMGSTSTGSMEAATAAGADISGENEKLKKDNEKLSGELALAKKQCEELVAFLRDSLNVSPDVIERIIRQGTCVSSNNDAVRFDAIINNDLDDDENAVGECEPQQPPPKGDNGESLKLFGVWLKGQNGKENSIGKCRKRGRQDYPIAATAKELKTLV

SEQ ID NO: 31590 - protein, 319 aa, Glycine max
  Clone ID: TF_GmC662_1.pep
MMEHNIIVNNNVIAPFVIKTYNMVNDPTTDKLITWGPANNSFIVLDPLDFSHSLLPTFFKHNNFSSFVRQLNTYGFRKVDPDRWEFANEWFLRGQKHLLRNIVRKKHGGAGRTNSNSHYSHPLKLEELDDEAMVMEIARLKEEQKALEEELHEMNKRLETTEKRPQQMMAFLCKVVEDPQILSRILREREKKHLGEKKRRLIPPPPPTAATSSSSSSGIKTEFEEDEGNYNIKSSSPETGLEIDNNSNNICSPPPLGCWGEQGCYGYNCASVPAPLTVVAPAFPTMGGGYLRRGGFWGEMAAEGNAVPPYPFSLLEGGF

SEQ ID NO: 31591 - protein, 283 aa, Glycine max
  Clone ID: TF_GmC114_1.pep
MSQRSVPAPFLTKTYQLVEDQGTDQVISWGESGNTFVVWKHADFAKDLLPKYFKHNNFSSFVRQLNTYGFRKIVPDKWEFANEHFKRGQKELLSEIKRRKTVPQSSAHPPEAGKSGGDGNSPLNSGSDDAGSTSTSSSSSGSKNQGSVETNTTPSHQLSSENEKLKKDNETLSCELARARKQCDELVAFLRDRLMVGPDQIDRIMRQGSCGSENAVGEGGGGGHCLKLFGVWLKGDTLTDKRNNHKRGREDQMGFGGPRLKESKPVVDFSRNRMMMINEKGKG

SEQ ID NO: 31592 - protein, 282 aa, Glycine max
  Clone ID: TF_GmC114_2.pep
MSQRSVPAPFLTKTYQLVEDQGTDQVISWGESGNTFVVWKHADFAKDLLPKYFKHNNFSSFVRQLNTYGFRKIVPDKWEFANEHFKRGQKELLSEIKRRKTVPQSSAHPPEAGKSGGDGNSPLNSGSDDAGSTSTSSSSSGSKNQGSVETNTTPSHQLSSENEKLKKDNETLSCELARARKQCDELVAFLRDRLMVGPDQIDRIMRQGSCGSENVVGEGGGGDCLKLFGVWLKGDTLTDKRNNHKRGREDQMGFGGPRLKESKPVVDFGAVNIMMKSNRVCN

SEQ ID NO: 31593 - protein, 124 aa, Glycine max
  Clone ID: TF_11689459.pep
NMVFTFESQKSVPAPFLTKTYQLVDDPHTDHIVSWGEDETTFVVWKPPEFARDLLPNYFKHNNFSSFVRQLNTYVSILIFSYVLLYNPYSSSLLHFTSLSLKVKLFPFEQIDQILMLEVKYDGT

SEQ ID NO: 31594 - protein, 339 aa, Glycine max
  unsure (1)..(339): unsure at all Xaa locations
  Clone ID: TF_GmC1086_1.pep
MVVPQPIEGLHETGPPPFLTKTYDIVDDPSTNHIVSWSTGNNSFVVWDPQAFSVTLLPKFFKHNNFSXFVRQLNTYGFKKVDPDKWEFANEMFLRGQRILLKNIRRRKANHHQSHQHAMQQGVEEPFVEVGQFELDGEIDRLRRDRQVLMVELVKLRQQQQSTKSHLQEMEGRIKMTEQKQKQMMNFLARAMQNPNFVQQLAQQKECSRELEEVFSNKKRRPIDQGPNVVEVADDDDELLGCAEECSDFVKLEPQEYYSDDKVLEFEVPDLDLALNLDEENIESQKRIMEEEHVQLENSRERYIDEVFWQDLLNEGIEDQGVLGVEDVDVLAKQLGYLA

SEQ ID NO: 31595 - protein, 142 aa, Glycine max
  Clone ID: TF_GmC1242_3.pep
MAPLPAEQTGESAPTELQRSIPTPFLTKTYQLVDDPSADDLISWNEDGTSFIVWRPAEFARDLLPKYFKHNNFSSFVRQLNTYGFRKVVPDRWEFANDCFRRGERALLRDIQRRKLLPVPRRARRGTRRKQRFRSCLGFRLD

SEQ ID NO: 31596 - protein, 423 aa, Glycine max
  Clone ID: TF_GmC802_1.pep
MNSSPSSSQLPSSSADFDKFNSLPRFRPLECLQGNPVPAFLSKTFELVDDPSLDPIISWGSTGVSFVVWDPTLFARHVLPRNFKHNNFSSFVRQLNTYGFRKIDTEKWEFFNEAFQRGKRHLLKNIRRRGPPQSHQVGGNIVPYSDADKAGLEFELESLRKERSVLMQEVVELQQQQRTTLQRARQVNQRLQSAELIQKQMVSFLARLFEKPAFLTSLQHAKEQRDLGCPKVRRRFIKQHQGQTEISDFLNEGQIVRYQPDWRNVTTSSEIQEMYPVSLEESPNYLSQALAKEFSEGTENLISDEVMSIADTMGFKSSSFGLDGNLFKGKNVMSSNEGLLAEEFVSFPEDLTKETGFPEFSPLGTEGIIKREDKRNTNFDVSGADSSSGNEQWGNPINYEVPEFVVTSGMTDMWDINYLTHSK

SEQ ID NO: 31597 - protein, 62 aa, Glycine max
  unsure (1)..(62): unsure at all Xaa locations
  Clone ID: TF_GmC790_2.pep
MMEEAQGNSSSLPPFLTKTYEMVDDPSTNSIVSWSATNRSFIVWNPPEFSRDLVPQXLKHNN

SEQ ID NO: 31598 - protein, 133 aa, Glycine max
  Clone ID: TF_GmC5805_1.pep
VSWSRGNNSFVVWDPQAFSITLLPRYFKHNNFSSFVRQLNTYGFRKVDPDKWEFANEGFLRGQKHLLKNIRRKKTLTNQQQALPIDHCVEVGRFGSLDGEVDALRRDKQVLMVELVKLRQQQQNTRSFLHSLC

SEQ ID NO: 31599 - protein, 78 aa, Glycine max
  Clone ID: TF_GmC1855_4.pep
MEGGGSTPAAPIPNANAPPPFLSKTYDMVEDPSTDAIVSWSATNNSFIVWDPPEFARDLLPKYFKHNNFSSFVRQLNT

SEQ ID NO: 31600 - protein, 75 aa, Glycine max
  unsure (1)..(75): unsure at all Xaa locations
  Clone ID: TF_LIB3139-119-P1-N1-A12.pep
HIVRVFFSILTNTYHYVXDHFTDQVISWCECFNXFFLFKLAYYAKDLFSYYFKHNNFFSFIRQLNTYGFLKIVPY

SEQ ID NO: 31601 - protein, 203 aa, Glycine max
  unsure (1)..(203): unsure at all Xaa locations
  Clone ID: TF_GmC1065_1.pep
MKGVTVKVEETMAYANAASTSPTTSSNLSPQPMEGLHEVGPPPFLTKTFDVVEDPSTNDIVSWSRSRNSFVVWDSHKFSTTILPRYFKHNNFSSFVRQLNTYGFRKIDPDKWXFANEGFLAGQRQLLKTIKRRRHVTVTQTQSHEGGSGACVELGEFGLEGEMERLRRDRTVLMAEIVRLRQQQHNSREQLGEVEERQDSVDG

SEQ ID NO: 31602 - protein, 167 aa, Glycine max
  Clone ID: TF_11413503.pep
MSSDKLKSKSKNKFAVDDSIPTFIRKTYEILEENKFPDIIDWNYEGLALIIKKPAEFCQKVLPLYFKHNNLTSFIRQLNMYNFHKRRTQDVDHIYCHELFQRGKKHLLKDIRRKNNEHSLTIKSMDMLENINSNDNTGLLQENQLLKILNKEAAVKVSTYEKKIKDL

SEQ ID NO: 31603 - protein, 464 aa, Glycine max
  Clone ID: TF_GmC58_1.pep
MEGASWNSSVCVAPFLSKTYDMVDDPSTDLVVSWGENNNSFVVWNVPQFATDILPNHFKHNNFSSFVRQLNTYGFRKVDPDRWEFANEGFLRGEKQLLKSISRRKSAHVNGSQQASQVHKSAAGACVEVGKFGLEEEVERLKRDKNVLMQELVRLRQKQQGTDNQLQNVGQRVQSMEQRQQQMMSFLAKAMQSPGFLAQFVQQQNESSKHIPGSNKKRRLQRQEEDSLATKDLHSSLDGHIVKYQSSINEAAKALFRQILQINNSTTQSSIKNPDVFLIDDIPSAIASDSSSSSTQVSNVMVPPISELTSMEVGSQFPLSCMPSNISEVQSSPAVLGFCRSQGMETESSLLNHELNVMGADTRNMGEIDMMSTVLDEADEADHFSPDTDGISKLPEISDEFWELFLRPSPLTEDTEETKCSSLGCGLTEDQGLPSEMGNKQENFDTIQHVDCLTQQMGLHALEY

SEQ ID NO: 31604 - protein, 111 aa, Glycine max
  Clone ID: TF_LIB3065-001-Q1-N1-A6.pep
MQKRTKPNIIENQKNGGRCLQPTTSINKGLPTTTVLVCHPIKFGRVLVGTYFKHIICSILIRHLNTYRFRQIHTERWEYANDEFLPDPKHVIPNIHSRKPIHSHRHSASSL

SEQ ID NO: 31605 - protein, 108 aa, Glycine max
  Clone ID: TF_jC-gmro02910071a08a1.pep
MAPPPPVEHNGDSAATASASASAESQRSIPTPFLTKTYQLVDDQSIDDVISWNDDGSTFIVWNPTVFARDLLPKFFKHNNFSSFVRQLNTYVIISIQLFGLVFFFFFA

SEQ ID NO: 31606 - protein, 396 aa, Glycine max
  Clone ID: TF_700891365_FLI.pep
ISNLQGFRKVDPDRWEFANEGFLRGEKQLLKSISRRKSAHVNGSQQASQVHKSAAGACVEVGKFGLEEEVERLKRDKNVLMQELVRLRQKQQGTDNQLQNVGQRVQSMEQRQQQMMSFLAKAMQSPGFLAQFVQQQNESSKHIPGSNKKRRLQRQEEDSLATKDLHSSLDGHIVKYQSSINEAAKALFRQILQINNSTTQSSIKNPDVFLIDDIPSAIASDSSSSSTQVSNVMVPPISELTSMEVGSQFPLSCMPSNISEVQSSPAVLGFCRSQGLETESSLLNHELNVMGADTRNMGEIDMMSTVLDEADEADHFSPDTDGISKLPEISDEFWELFLRPSPLTEDTEETKCSSLGCGLTEDQGLPSEMGNKQENFDTIQHVDCLTQQMGLHALEY

SEQ ID NO: 31607 - protein, 396 aa, Glycine max
  Clone ID: TF_GmC58_2.pep
ISNLQGFRKVDPDRWEFANEGFLRGEKQLLKSISRRKSAHVNGSQQASQVHKSAAGACVEVGKFGLEEEVERLKRDKNVLMQELVRLRQKQQGTDNQLQNVGQRVQSMEQRQQQMMSFLAKAMQSPGFLAQFVQQQNESSKHIPGSNKKRRLQRQEEDSLATKDLHSSLDGHIVKYQSSINEAAKALFRQILQINNSTTQSSIKNPDVFLIDDIPSAIASDSSSSSTQVSNVMVPPISELTSMEVGSQFPLSCMPSNISEVQSSPAVLGFCRSQGMETESSLLNHELNVMGADTRNMGEIDMMSTVLDEADEADHFSPDTDGISKLPEISDEFWELFLRPSPLTEDTEETKCSSLGCGLTEDQGLPSEMGNKQENFDTIQHVDCLTQQMGLHALEY

SEQ ID NO: 31608 - protein, 146 aa, Glycine max
  unsure (1)..(146): unsure at all Xaa locations
  Clone ID: TF_GmC1855_3.pep
MDGRASSSVGGEASPAPAPVPITNANAPPPFLSKTYEMVEDPSTDSIVSWSPTNNSFVVWNPPEFARDLLPKHFKHNNFSSFVRQLNTYGFRKVDPDRWEFANEGFLRGQKHLLKTITRRKPAHGHNQQAQQAHGXESSVXACVES

SEQ ID NO: 31609 - protein, 231 aa, Glycine max
  Clone ID: TF_GmC92665_1.pep
MEGTSEKGLWECGRKCTPPPFLLKTYMLVDDPATDDVVSWNSEGTAFVVWQPAEFARDLLPTLFKHSNFSSFVRQLNTYGFRKIATSRWEFFNERFKKGERELLHEIRRRKAWTSKQQPNAPNQATLQDSDEDQRSSSISSSSGYTTLVDENKRLKKENGVLNSELTSMKRKCKELLDLVAKYSSHAKEEKEDERPMLFGVRLDVQGEREMKRHRAEMSESASIMLSQSCK

SEQ ID NO: 31610 - protein, 90 aa, Glycine max
  unsure (1)..(90): unsure at all Xaa locations
  Clone ID: TF_GmC62779_1.pep
TAPAXYPGXARVPIWNHPETEKELFFLFNAISHLSLLAFLFQVQGFNNVTAIFIFNLIIVALRASFYIFSRPGKEESLVIIFGEIQPMIL

SEQ ID NO: 31611 - protein, 73 aa, Glycine max
  unsure (1)..(73): unsure at all Xaa locations
  Clone ID: TF_jC-gmXLIB3563P024ab12a1.pep
RLPLTGHSGSRLLSNRCKGCTTVGHSPILKKTSEMVYDPHTNPIVSWSQTRHIFLIXDSHEFCKALISKYFKH

SEQ ID NO: 31612 - protein, 149 aa, Glycine max
  Clone ID: TF_GmC1873_1.pep
DGKGFLSDSQSSVSPGKLSSTAEFSWQVGSDTSHCKVFMESEDVGRTLDLSCLSSYQELYMRLANMFGIERSDMLSHVLYCDSSGALKQIGEEPFSEFMKTAKRLTILTDSNNKDSRSLFCRVWITGTRNAEHGLDAASNKTGPLSIFA

SEQ ID NO: 31613 - protein, 72 aa, Glycine max
  Clone ID: TF_jC-gmle01810073g03d1.pep
AGGILSKGSVTRHPIRVLLVGSGQYTLVYEVNEGVRMLVGDVPWHMFVSTVKSLRVLKSSNPRAFTLGSKQD

SEQ ID NO: 31614 - protein, 67 aa, Glycine max
  unsure (1)..(67): unsure at all Xaa locations
  Clone ID: TF_6725509.pep
FMNKSKLMVLLNSCEYAPSYEDKNGDXMFVGNAPWEMSVESPTRLRKMKGSKAMGLAPRHMEKCKSR

SEQ ID NO: 31615 - protein, 69 aa, Glycine max
  Clone ID: TF_10709975.pep
GALFVMVIMDGASYLRKVDLKSYTSYHVLSTAFEKMFLTCPTLSQSGSHGAPRGLLLRDRMLMDLLPGP

SEQ ID NO: 31616 - protein, 77 aa, Glycine max
  Clone ID: TF_LIB4200-008-Q1-N1-G8.pep
FFLMVIGETIFSYLFIFSCHLTCREFCNMVKRIFICSREDLKKMKCCKLPAFSSEVEEVLLSPDSQNRDETQQSHMP

SEQ ID NO: 31617 - protein, 101 aa, Glycine max
  Clone ID: TF_GmC1873_2.pep
EFSWQVGSDTSHCKVFIESEDVGRTLDLSCLGSYEELYMRLANMFGIERSEMLSHVLYRDAAGALKQTGEEPFSEFMKTAKRLTILTDSNNKDSRRWEKEN

SEQ ID NO: 31618 - protein, 56 aa, Glycine max
  Clone ID: TF_7285393.pep
YTISESGSHGAPGGEMLSESKVRDVVHGSEYVLSYEDKDGDGMPCGDVRWEMCLDI

SEQ ID NO: 31619 - protein, 47 aa, Glycine max
  Clone ID: TF_LIB3242-736-P1-J1-A7.pep
FEEVVESSLFTFSKKQGECFQVGHVPWQSFIGSVRRLVILTNGSETI

SEQ ID NO: 31620 - protein, 199 aa, Glycine max
  Clone ID: TF_GmC234576_1.pep
MELQLGLALSTHSRAYDQPFSHKKRTFSQLMMMEHAPPPHHVMLPTLSLLPLTPSHHVVDDHHSQCSNITKDEEEEGVVGWPPVNHWRKKLHVEEVVGNNNNIDHMVWVDHRQTHSLQGYSSNTLYVKVKMEGVGIARKVDLSMHQSFHTLKETLMDMFGKCHHQQSNNYELAYLDKEGDWLLAQDVPWRQVHPTYLSP

SEQ ID NO: 31621 - protein, 64 aa, Glycine max
  unsure (1)..(64): unsure at all Xaa locations
  Clone ID: TF_12689612.pep
LENMFNCTCGXYSVREGINGFXYAPTYENQDGDNMLVGYVPWYLFVSIGNTLMMTIGIKPKGYG

SEQ ID NO: 31622 - protein, 124 aa, Glycine max
  Clone ID: TF_GmC31466_2.pep
HASGQQSHHPFVNIYSQVPAEVNDCSNDHSSFFVKVYMEGIPIGRKLNILAHGGYYELVRTLEHMFDTTILWGTEMNGVQPERCHVLTYEDEEGDLVMVGDVPWEMFLSTVKRLKITRVDTFGC

SEQ ID NO: 31623 - protein, 72 aa, Glycine max
  Clone ID: TF_GmC6795_2.pep
NSARAKLLDGSSKFVLTYEDKEGDWMLVGDVPWGMFFSSVRRLRIMRTSEANGLGKQMLYFSKHNLPMFFFC

SEQ ID NO: 31624 - protein, 129 aa, Glycine max
  Clone ID: TF_12487451.pep
MMDHAAPPESTLTDHVMLPTLSLLPLTPNHHHDDDHHSQCSNITKDDEEEESVVGWPPVNYHWRKKLRVDEGVRNNNNNNHMVSVADHRHHSVYVKVKMEGVGIAREVDLSMHQSFHTLKQTLDGHVWM

SEQ ID NO: 31625 - protein, 49 aa, Glycine max
  Clone ID: TF_LIB3242-504-P1-K1-C5.pep
SWPPASKNNDPVDGKPGAAALFVKVSMDGAPYLRKVDLTNYTMYQELMI

SEQ ID NO: 31626 - protein, 96 aa, Glycine max
  Clone ID: TF_jC-gmst02400037e07d2.pep
IFFPTKQKTPDTFKVTTLRSIVSVKGFIFIYIFFGPLWDGISSNIVLGPLQLLLLHFSIAFGASPIAFDPFIIRRRLGDSTNISHGESPTSIPSPS

SEQ ID NO: 31627 - protein, 46 aa, Glycine max
  Clone ID: TF_6964391.pep
EYKDGDCMLVGDVPREMFTDSCLRLKIMKSLETIELAPRAMDKCKS

SEQ ID NO: 31628 - protein, 148 aa, Glycine max
  Clone ID: TF_GmC573_11.pep
PFRPRAQVVGWPPVRSYRKNTLQQKKEEQGEGSGMYVKVSMAGAPYLRKIDLNVYKSYPELLKALGNMFKCTFGKNLEQVLNNLLLFFLAFLRLIWHIYVYVERRNKVVIACDPGEYSEREGYNGSEYAPTYEDKDGDWMLVGDVPWK

SEQ ID NO: 31629 - protein, 307 aa, Glycine max
  Clone ID: TF_GmC1078_1.pep
MSRALEHDYIGLAENPSMDGKNSSSLNLKETELRLGLPGCESPERKSGSALCLFGKELQNNNNNVCSLKAGAKRGFSDAIDTSSVTEGSQGASALFSPRGGNVGKPLIGLDTQTNTTIKEVGAVPQSAKPVQENNDQFAATNAHAIAPAAKAQVVGWPPIRSFRKNTMASNLTKNNDEAEGKSGFGCLYVKVSMDGAPYLRKVDLKTYNNYMELSSALEKMFSCFTIGQCNSPGLPGKDGLSESSLRDLLHGSEYVLTYEDKDGDWMLVGDVPWEMFTDSCRRLRIMKGSEAIGLAPRAMEKSRSQN

SEQ ID NO: 31630 - protein, 319 aa, Glycine max
  Clone ID: TF_GmC1078_2.pep
MSRALEHDYIGLAENPSMDGSSDKLSSEDGKTSSLNLKETELRLGLPGCESPERKSGSALCLFGKELQNNNNVCSVVSPLKAGAKRGFSDVTEGSQGAALFSPRGANVGKPIIGLDTQTNTQQQANTTIKEVGAVLPQSTKPVQEKNDQVAATNGHASAPAAKAQVVGWPPIRSFRKNTMASNLTKNNDDDEGKSGFGCLYVKVSMDGAPYLRKVDLKTYNNYMELSSALEKMFSCFTIGQCNSPGLPGKDGLSESSLRDLLHGSEYVLTYEDKDGDWMLVGDVPWEMFTDSCRRLRIMKGSEAIGLAPRAMEKSRSQN

SEQ ID NO: 31631 - protein, 47 aa, Glycine max
  Clone ID: TF_21676827.pep
ENEEGDWMLAEKGPWKMITDSCERLRMMKSAESLGLSPKAMEKCKSR

SEQ ID NO: 31632 - protein, 53 aa, Glycine max
  unsure (1)..(53): unsure at all Xaa locations
  Clone ID: TF_uC-gmroLIB3259P227g10a1.pep
YVLTYEDKDGDWMLVGXVPWEMFIDTCKRLKIMKGSDAIGLAPRAMEKSKSRS

SEQ ID NO: 31633 - protein, 105 aa, Glycine max
  Clone ID: TF_GmC573_15.pep
VEQQGDGSGTYLKVSMAGAPYLRKIDLKVYNSYPELLIRLQVNSDIYPGEYSEREGYNGSEYAPTYEDKDGDWMLVGDVPWNMFVSSCKRLKIIKGSEAKGLGCL

SEQ ID NO: 31634 - protein, 167 aa, Glycine max
  Clone ID: TF_uC-gmroLIB3258P131f02b1.pep
CTNQPTALGASVLKETVPHSPKPLHENKPQISAPAAKAQVVGWPPIRSFRKNSMASQPQKNDAAADAEAKSGCLYVKVSMEGAPYLRKVDLNSFTTYKDLSLALEKMFSCFTLKYVLTYEDKDGDWMLVGDVPWEMFTESCKRLRIMKSSEAIGLAPRAMEKCKSRY

SEQ ID NO: 31635 - protein, 294 aa, Glycine max
  Clone ID: TF_GmC166_1.pep
MSEALEEVVPSMKGGCEEEGLNLKATELRLGLPGCESPEREGVFKSVVVSGAKRGFSDAIDGNWNGGGSEKDAAALFSPTSRGAVSVSVSAAKSLTLTATDCTNQPTALGASVLKETVPHSPKPLHENKPQISAPAAKAQVVGWPPIRSFRKNSMASQPQKNDAAADAEAKSGCLYVKVSMEGAPYLRKVDLNSFTTYKDLSLALEKMFSCFTLSQCGSYGVSSRENLSESRLMDLLHGSEYVLTYEDKDGDWMLVGDVPWEMFTESCKRLRIMKSSEAIGLAPRAMEKCKSRY

SEQ ID NO: 31636 - protein, 127 aa, Glycine max
  Clone ID: TF_GmC166_3.pep
QIPSLDAFIGKVSMEGAPYLRKVDLNSFTTYKDLSLALEKMFSCFTLSQCGSYGVSSRENLSESRLMDLLHGSEYVLTYEDKDGDWMLVGDVPWEMFTESCKRLRIMKSSEAIGLAPRAMEKCKSRY

SEQ ID NO: 31637 - protein, 109 aa, Glycine max
  Clone ID: TF_GmC2301_8.pep
SILRSTLVGKQSYLSQRPSLFVKVYMEGIPIGRKLNLMAHYGYDGLVKTLGHMFRTNILCPNSQPLNSGNFHVLTYEDQEGDWMMVGDVPWEMFLNSVKRLKITRADRC

SEQ ID NO: 31638 - protein, 170 aa, Glycine max
  Clone ID: TF_GmC371_5.pep
IDGSANNNNSAPATKAHVVGWAAIRSFRKNSLATTSKNNEVVDGKKGVGALFVKVSMDGAPYLRKVDLKNYSTYPELSSALEKMFSCFTISKCGSHGILGREMLNETKLKDLLHGSEYVLTYEDKDGDWMLVGDVPWEMFIETCKRLRIMKSSDAIGLAPRAVEKSKSRT

SEQ ID NO: 31639 - protein, 352 aa, Glycine max
  Clone ID: TF_GmC183_2.pep
MSPPLLVTEDEGQCHASMVASASSPSLNCFSLNEAGFKECNYLGLSDCSSVDSSTVPNLSDEKKENLNLKATELRLGLPGSQSPERETELFSLSSTKLDEKPLFPLLPTKDGICSLSQKTVVSGNKRGFADTMDPEFPGNAGINMMLSPKPSGVQPTTVKEIPSKVLQELPSAANGTGHNHTSGASISGSAPAAKAQVVGWPPIRSFRKNSLATTTNKNNDEVDGKPGVGALFVKVSMDGAPYLRKVDLRSYTTYQELSSALEKMFLSCFTLGQCGSHGAPGREMLSESKLRDLLHGSEYVLTYEDKDGDWMLVGDVPWEMFIDTCKRLKIMKGSDAIGLAPRAMEKSKSRS

SEQ ID NO: 31640 - protein, 252 aa, Glycine max
  Clone ID: TF_GmC1199_1.pep
MEVGLKKENMGFEETELRLGLPGNGGTEEVLIRKRGFSETETGHEDESATTVDLMLNLSSKEAATTAAAAADPTDKHKTLPKEKTLLPADPAKPPAKTQVVGWPPVRSFRKNMLAVQKSVGEESEKNSSPNASFVKVSMDGAPYLRKVDLKMYKSYRELSDSLGKMFSSFTIGNCESQGMKDFMNESKLNDLLNSSDYVPTYEDKDGDWMLVGDVPWEMFVESCKRLRIMKGKEAIGLGLAPRAMAKSKNRS

SEQ ID NO: 31641 - protein, 194 aa, Glycine max
  Clone ID: TF_GmC2301_5.pep
MGTLEQIDAPQTRSSSSSSSSIDSNNHPSRTRTPPPSSPSSSACRNRTDLSTDLRLGLSISPSSQSELPFNSTPREESFDWPPIKSILRSTLVGKQSHLSQRPSLFVKVYMEGIPIGRKLNLMAHYSYDGLVKTLGHMFRTNILCPNSQPLNSRNFHVLTYEDQEGDWMMVGDVPWEMFLNSVKRLKITRADRC

SEQ ID NO: 31642 - protein, 184 aa, Glycine max
  unsure (1)..(184): unsure at all Xaa locations
  Clone ID: TF_uC-gmroLIB3259P204h02a1.pep
RANDPAKPPAKAQVVGWPPVRSFRKNIVQRNKNEEEAAFVKVSMDGAPYLRKVDIKLYKSYQELSDALAKMFSSFTIEKCGSQGMKDFMNETKLIDLLNGSDYVPTYQDKDGDWMLVGDVPWESVPLFIPLFPFFFLXFIIPLYYSFSQFHRMFVESCQRLRIMKGSEAIGLAPRAVEKCKNRS

SEQ ID NO: 31643 - protein, 161 aa, Glycine max
  unsure (1)..(161): unsure at all Xaa locations
  Clone ID: TF_uC-gmrominsoy311g10b1.pep
FIRSFRKNSMATTSNKNNDEVDGKPGVGALFVKVSMDGAPYLRKVDLRSYTTYQELSSALEKMFLSCFTLGQCGSHGAPGREMLSESKLRDLLHGSEYVLTYEDKDGDLDCLXGDVPWEMFIDTCKRLKIMKGSDAIGLVCLSRSSWLTAPRAMEKSKSRS

SEQ ID NO: 31644 - protein, 222 aa, Glycine max
  unsure (1)..(222): unsure at all Xaa locations
  Clone ID: TF_GmC435_4.pep
MDERSRNEASPQLLDLISNEREWQMNKRNEGKSSEERKLELRLGPPGEDWSLGGKMKNTEREESLLSLGCFSPNNGXFSPSSANTAVSQPNTSQKRTAPAPVVGWPPIRSFRKNLASSSSASKPPPESQAEQHNKVAGKKPVDNYANNKGLFVKINMDGVPIGRKVDLNAYDSYENLSSAVDELFRGLLAAQRDSSAGGVHNKXEEEKAITXLLDGSGEYTL

SEQ ID NO: 31645 - protein, 293 aa, Glycine max
  unsure (1)..(293): unsure at all Xaa locations
  Clone ID: TF_GmC1825_3.pep
MTTMLTNEHGLSLNLKETELCLGLPGGGSEVETPRATGKRGFSETVDLKLNLQTKEDLNENLKNVSKEKTLLKDPAKPPAKAQVVGWPPVRSYRKNMMAVQKVSNEEVAEKTTSSTIANSGAFVQVSMDGAPYLRKVDLPMYKSYIRLIXCLGQNVQLLHHGYLWGPRNDIFMNDSKLMDLPPSSEYVPPHQNTDGDWMLVGDVPWEMFVVVMQPPGEIMNGSETIGPCVQNIGKMQKQKGKLAQYNVLREIPYATGPMEQIISPTSATLWSGMLLVECVWCLAFCSYKDCVV

SEQ ID NO: 31646 - protein, 174 aa, Glycine max
  Clone ID: TF_GmC870_1.pep
ENNRDAQQELSSSMVSQTFGVPDMAFNSIDSTIDDSNFLNSGPWAPPPAPPPLPPAQFQRMRTYTKVYKRGAVGRSIDITRYSGYEELKKDLARRFGIEGQLEDRQRIGWKLVYVDHESDVLLVGDDPWEEFVNCVRCIKILSPQEVQQMSLDGDFGNGGLQNQACSSSDGGNT

SEQ ID NO: 31647 - protein, 220 aa, Glycine max
  Clone ID: TF_GmC1199_4.pep
MEVGLNKKENMGFEETELRLGLPGNVGGTGTEEVLIRKRGFSETETETEEDESATTVDLMLNLSSKEAAAAADPTDKHKTLPKEKTLLPADPAKPPAKAQVVGWPPVRSFRKNMLAVQKSVGEENEKNSSSPNASFVKVSMDGAPYLRKVDLKMYKSYPELSDALGKMFSSFTIGNCESQGFKDFMNESKLMDLLNSSDYVPTYEDRDGDWMLVGDVPWE

SEQ ID NO: 31648 - protein, 117 aa, Glycine max
  Clone ID: TF_GmC183_4.pep
VSMDGAPYLRKVDLRSYTTYQELSSALEKMFLSCFTLGQCGSHGAPGREMLSESKLRDLLHGSEYVLTYEDKDGDWMLVGDVPWEMFIETCKRLKIMKGSDAIGLAPRAMEKSKSRI

SEQ ID NO: 31649 - protein, 187 aa, Glycine max
  Clone ID: TF_GmC590_3.pep
MAKEGLGLEITELRLGLPDAEHVTVVNKNEKKRAFSQIDDENSSSGGDRKIKTNKSQVVGWPPVCSYRKKNSMNEGSKMYVKVSMDGAPFLRKIDLGLHKGYSDLALALDKLFGSYGMVEALKNADNSEHVPIYEDKDGDWMLVGDVPWEMFMESCKRLRIMKRSDAKGFGLQPKGSLKGFIESAAK

SEQ ID NO: 31650 - protein, 129 aa, Glycine max
  Clone ID: TF_GmC183_3.pep
VDGNRGAAALFVKVSMDGAPYLRKVDLRNYTMYQELSSALEKMFSCFTLGQCGSHGAPGREMLSESKLKDLLHGSEYVLTYEDKDGDWMLVGDVPWDMFIDTCKRLKIMKGSDAIGLAPRAMEKSRSRC

SEQ ID NO: 31651 - protein, 69 aa, Glycine max
  Clone ID: TF_jC-gmle01810061b03a1.pep
YVLTYEDKDGDRMLAGDVPWDMLIETCKKLRIMLSSEAIGLAATAVRKKAEHDLGSSCVAVYASNCLRD

SEQ ID NO: 31652 - protein, 55 aa, Glycine max
  unsure (1)..(55): unsure at all Xaa locations
  Clone ID: TF_LIB4366-010-R1-N1-F12.pep
SENVFSLEAKEGEWRLVGDVPGGKFPEFCKRLRIIKSFXAIGVAPKALEKGKSRS

SEQ ID NO: 31653 - protein, 77 aa, Glycine max
  Clone ID: TF_GmC435_6.pep
EGKCESSNLSKKLTEIFRSFASVYRHFKSSFRKKKKKKTHSSHYLVVMYATSFIPCSFHQTIEPKRQIRKSLQVFSR

SEQ ID NO: 31654 - protein, 301 aa, Glycine max
  Clone ID: TF_GmC1129_1.pep
SFSQDGTSQLLNLSGSNSVMSSAAMLPKQITTEPPQLPSAAPQCVLPQVENLGTSQSNVSELAALPPFAGREHSAYHAAADPQSNLLFGINIDPSSLMLQNGMSNLRNIGNVNNSLSLPFSASNCGGASGTDFPLSSNMTTSSCVDESGFLQSSENVDQANTPTGTFVKVHKSGSFGRSLDISKFSSYDELISELARMFGLEGQLEDPKTQRSGWQLVFVDRENDVLLLGDDPWQEFVNNVWYIKILSPLEVQQMGKGLSPSTSAPGNKLSTPANSCDNYVSQQELRSSRNGMASMGSFHY

SEQ ID NO: 31655 - protein, 276 aa, Glycine max
  Clone ID: TF_GmC22_1.pep
MGTLGRAIYSVGNWIRETGQAIDRLGSRLQGGYYFQEQLSRHRTLMNIFDKAPVVDKDVFVAPSASVIGDVQLGRGSSIWYGVVLRGDVNIIRVGNGTNIQDNSLVHVAKSNLSGKVLPTIIGDNVTVGHSAVIHGCTVEDEAFVGMGAILLDGVVVEKNAMVAAGALVRQNTRIPSGEVWAGNPAKFLRKLTDEEIAFISQSATNYTNLAQVHAAENSKSFDEIEFEKVLRKKFARKDEEYDSMLGVVREIPPELILPDNVLPDKAEKALKKSGI

SEQ ID NO: 31656 - protein, 107 aa, Glycine max
  Clone ID: TF_uC-gmropic110e02b1.pep
LPFVRPTSLPAPRELLLILLLPITVPGSNGEDYGIIIGGERHSKLLDGSSKFVLTYEDKEGDWMLVGDVPWGMFLSSVRRLRIMRTSEANGLAPRLEENIKQRCKPI

SEQ ID NO: 31657 - protein, 145 aa, Glycine max
  Clone ID: TF_GmC224473_1.pep
STHASATTQNLQNSAKRSCTKVHKQGSLVGRAIDLSRLSGYNDLLSELERLFSMEGLLKDPDKGWKILYTDSENDIMVVGDDPWHEFCDVVSKIHIYTQEEVEKMTIEMISDDTHSCLEEAPVIMEASKSSSVGQPDYSPTAVRV

SEQ ID NO: 31658 - protein, 222 aa, Glycine max
  Clone ID: TF_GmC26770_1.pep
MEVDLVLALPTQNSVEEFKLNKSKQIVSLQLWRASCGSESEKRVKHNKRSFEESFGHFLKPFPLLVWSGQPNEEEDRSEKVQRNIHTPNKNGDEENHLVGWPPVKSWRRKELHQQHPARGQIRNDRIQANENQSRRPNSLYVKVNMEGVAIGRKINLRLFNSYQTLTSSLISMFAKCILNFLCYARYQKFEEVGESYTLNFQNEQGDWLQVGHVPWQYVHIL

SEQ ID NO: 31659 - protein, 106 aa, Glycine max
  Clone ID: TF_GmC570_3.pep
GYDELRHDLARMFGIEGQLEDPQRTEWKLVYVDHENDILLVGDDPWEEFVSCVQSIKILSSSEVQQMSLDGDLGHVPVPNQACSGTDNGNAWRGQYDDNSAASFNR

SEQ ID NO: 31660 - protein, 159 aa, Glycine max
  Clone ID: TF_GmC624_1.pep
MFLLWEQVVGWPPIRSFRKNSMATQPQKNDDNAEAKSVCLYVKVSMDGAPYLRKVDLKNFGTYMELSSALEKMFSCFTISQCGSHGVCGRDKLTENRLMDLLHGSEYVLTYEDKDGDWMLVGDVPWEMFTDSCKRLRIMKSSEAIGLAPRAMEKCKSRN

SEQ ID NO: 31661 - protein, 202 aa, Glycine max
  Clone ID: TF_GmC573_13.pep
MENSLGKYGKELNLEATELRLGLPGSDEPEKRSAVRSNKRSSPEASEEECISKGNMNSSDGSDITSDDQDNVVPPAKAQVVGWPPVRSYRKNSLQQKKEEQAEGAGMYVKVSMEGAPYLRKIDLKVYKSYPELLKALENMFKCTFGQYSEREGYNGSEYAPTYEDKDGDWMLVGDVPWNMFVSSCKRLRIMKGSEAKGLGCF

SEQ ID NO: 31662 - protein, 103 aa, Glycine max
  Clone ID: TF_LIB4167-012-R1-N1-A10.pep
RPLPLPISKHPLKKTNHPFVSGPESPNMDSHSIGLIWKPQERQTFFICMLLSPEGPHPWDLQPFYRGKKHSPRDIPTQNKIPFSYLKSKNMTSFGWPPLLLSP

SEQ ID NO: 31663 - protein, 194 aa, Glycine max
  Clone ID: TF_GmC960_2.pep
MENTTVTYQTDLNLKATELRLGLPGTEESEEKTLSAGARINNKRPLTETSDECASNGTSSAPHEKTETAPPAKTKIVGWPPIRSYRKNILQESEGAGIYVKVSMDGAPYLRKIDLKVYGSYTQLLKSLENMFKLTISEYSEREGYKGSEYAPTYEDKDGDWMLVGDVPWDMFMTSCKRLRVMKGSEARGLGCGV

SEQ ID NO: 31664 - protein, 105 aa, Glycine max
  Clone ID: TF_LIB3242-425-P1-N1-E9.pep
VDLKNYSTYPELSSALEKMFSCFTISKCGSHGILGREMLNETKLKDLLHGSEYVLTYEDKDGDWMLVGDVPWEMFIETCKRLRIMKSSDAIGLAPRAVEKSKSRT

SEQ ID NO: 31665 - protein, 62 aa, Glycine max
  unsure (1)..(62): unsure at all Xaa locations
  Clone ID: TF_GmC1078_3.pep
ARGESSLRDLLHGSEYVLTYEDKDGDWMLXMFTDSCRRLRIMKGSEAIGLAPRAMEKSRSQN

SEQ ID NO: 31666 - protein, 110 aa, Glycine max
  Clone ID: TF_GmC274615_1.pep
RLSSYNDLLIELERLFSMEGLLIDPNKGWRILYTDSENDIMVVGDDPWHEFCDVVSKIHIHTQDEVEKMTIGMMINDDSQSCLEQAPVMVEASKSSSVGQPDSSPTVVRM

SEQ ID NO: 31667 - protein, 65 aa, Glycine max
  unsure (1)..(65): unsure at all Xaa locations
  Clone ID: TF_uC-gmflminsoy007a12b1.pep
PWEKMVESCKRLXIMNGTEAMGMAPRAKEICKSRKLKRSQIQCTMKYRTKEDAIKIYIYIYMKHF

SEQ ID NO: 31668 - protein, 361 aa, Glycine max
  Clone ID: TF_GmC371_3.pep
MSPPVLSIGEEEGKSNVTLLVSSSTTMESVCLKSLEFKERNYMGLSDCSSVDSSVPSFSEETKSNLNLKATELRLGLPGSQSPDRDSDLCLRSSTQFDEKTLFPLRPLTDDHHSSAKTAVLGNKRGFSDAMNGFSSEGKFLVDSEAANPILSPRPASNLGLKPGSTLEKVGVQQTKMKEVATTKANEARPTIDGSANNNNSAPATKAQVVGWPPIRSFRKNSLATTSKNNEEVDGKVGVGALFVKVSMDGAPYLRKVDLKNYSTYPELSSALEKMFSCFTMSKCGSHGILGREMLNETKLKDLLHGSEYVLTYEDREGDWMLVGDVPWEMFIETCKRLRIMKSSDAIGLAPRAVEKCKSRT

SEQ ID NO: 31669 - protein, 231 aa, Glycine max
  Clone ID: TF_GmC22_2.pep
MINFEETELRLGLPGGSASDHNESTTVKGSGGKRGFSETASVDLKLNLSSSDDSASDSPSSASTEKTTTAAPPPPSRANDPAKPPAKAQVVGWPPVRSFRKNIVQRNKNEEEAAFVKVSMDGAPYLRKVDIKLYKSYQELSDALAKMFSSFTIEKCGSQGMKDFMNETKLIDLLNGSDYVPTYQDKDGDWMLVGDVPWEMFVESCQRLRIMKGSEAIGLAPRAVEKCKNRS

SEQ ID NO: 31670 - protein, 526 aa, Glycine max
  Clone ID: TF_GmC371_1.pep
MVARRKKSNTSYGSAATGSGSGSGSGGGYNTVQPSPPTTDQVQASAQTPENRKASPTVQKKADTSIVGKPFDDIKKYYSIGKELGRGQFGITYLCTENSSGGTYACKSILKRKLVSKADREDMKREIQIMQHLSGQPNIVEFKGAFEDRFSVHLVMELCSGGELFDRIIAQGHYSERAAASLCRSIVNVVHICHFMGVMHRDLKPENFLLSTKDDHATLKATDFGLSVFIEQGKVYHDMVGSAYYVAPEVLRRSYGKEIDIWSAGIILYILLSGVPPFWAETEKGIFNAILEGEIDFVSEPWPSISDSAKDLVRKMLTQDPNKRITSSQVLEHPWMREGGDASDKPIDSAVLSRMKQFRAMNKLKKLALKVIAENLSEEEIKGLKAMFANMDTDNSGTITYEELKTGLARIGSKLSEAEVKQLMDAADVDGNGSIDYLEFISATMRPHRLERDEHLYKAFQYFDKDNSGYITRDELEIAMTQNGMGDEATIKEIISEVDADNDGRINYEEFCAMMRSGMPHQGQLL

SEQ ID NO: 31671 - protein, 177 aa, Glycine max
  Clone ID: TF_GmC39872_1.pep
MGKASSSSSSSISSCRNPSNSTASSLTHQHSQDHLRTDLRLGLSLSATQHVGSSSSGGHWQPMQPHLISSFSQATEVNDCSDHTSFFVKVYMEGIPIGRKLNLLAHDGYHELVKTLEQMFDTTILWGTEMDGVQPERCHVLTYEDGEGDLIMVGDVPWEMFLSAVKRLKITRVEAFG

SEQ ID NO: 31672 - protein, 282 aa, Glycine max
  Clone ID: TF_GmC435_2.pep
MNERSRDEASPQLLDLISNEREWQMNKRNEGKSSEERKLELRLGPPGEDWSLGGKMKNNNTEREDQSLLSLGCFSPNINMFSPSSANTAVSQPNTSQKRTAPAPVVGWPPIRSFRKNLSSSSSASKPPPPPESQAEQQHNKVAGKKPVDNYANNKGLFVKINMDGVPIGRKVDLNAYDSYENLSSAVDELFRGLLAAQRDSSAGGVHNKQEEEKAITGLLDGSGEYTLVYEDNEGDRMLVGDVPWHMFVSTVKRLRVLKSSELSAFTLGSKQDKIPLDSAMK

SEQ ID NO: 31673 - protein, 183 aa, Glycine max
  Clone ID: TF_GmC11115_1.pep
MSSQSDAVGCNLKETELTLGLPGTKTNGTKRGFSDTLNTSHNKMLRPTSKEQVVGWPPVRASRKNAMKMSCKLVKVAVDGAPYLRKVDLEMYETYEHLMRELETMFCGLAIRNHLMNERKLMESGNGIEYMPTYEDKDGDWMLVGDVPWKMFVESCKRIRLMISSEAVGLGPRSTSSKCTGST

SEQ ID NO: 31674 - protein, 192 aa, Glycine max
  Clone ID: TF_GmC960_1.pep
MESTVTFETDLNLKATELRLGLPGTEEIVEKPLPASARITNKRPLSETSEECASKGSSAPHVETEAAPPAKAKIVGWPPIRSYRKNSLQENDGAGIYVKVSMDGAPYLRKIDLKVYGGYTQLLKALENMFKLTIGEYSEKEGYKGSDYAPTYEDKDGDWMLVGDVPWDMFVTSCKRLRIMKGSEARGLGCAV

SEQ ID NO: 31675 - protein, 253 aa, Glycine max
  Clone ID: TF_GmC870_2.pep
NTSISYNPQSLLFRDNNQDGEVQADARSNIPYANNIDSQMGMPLNPDSLSTKGTLRLGKDLSNNFSSEGMLGNYEINRDAQQEPSSSMVSQTFGVPDMAFNSIDSTIDDSNFLNSGPWAPPPAPPLPPLPPLPPAQFQRMRTYTKVYKRGAVGRSIDITRYSGYEELKQDLARRFGIEGQLEDRQRIGWKLVYVDHESDVLLLGDDPWEEFVNCVRCIKILSPQEVQQMSLDGDFGNGGLPNQACSSSDGGDT

SEQ ID NO: 31676 - protein, 177 aa, Glycine max
  Clone ID: TF_GmC31466_1.pep
MGKPASSSSSSISSTTNRHLLLSTASSLTQELPTDLRLGLGISATQHFASSISRGQWQQSHHPFVNIYSQVPAEVNDCSNDHSSFFVKVYMEGIPIGRKLNILAHGGYYELVRTLEHMFDTTILWGTEMNGVQPERCHVLTYEDEEGDLVMVGDVPWEMFLSTVKRLKITRVDTFGC

SEQ ID NO: 31677 - protein, 291 aa, Glycine max
  Clone ID: TF_GmC6795_1.pep
MSTVSKDDNLVLSSEDSSCPEESELELGLGLSLSSGPSSKSHHHHVHAPTTLYARIYTAKDFPSSAAAASSSPSSSSSSSPNITAGTKRAAADSLVANNRPSQVVGWPPLRTYRVNSFNSHAKSTEVFNSVAEKSKINNTVVRKTNDNDNDNNINAKEKRHLRSSLFVKVNMDGIPIGRKVDLSAHSSYETLAQTLEDMFNESTTVTTCKGSNGEDYGIIIGGERHSKLLDGSSKFVLTYEDKEGDWMLVGDVPWGMFLSSVRRLRIMRTSEANGLAPRLEENIKQRCKPI

SEQ ID NO: 31678 - protein, 173 aa, Glycine max
  unsure (1)..(173): unsure at all Xaa locations
  Clone ID: TF_uC-gmroLIB3259P148e08a1.pep
SAPTLLDTQGPYHTYPSLSHVLWRQSVTLYKKINLEETELRLSLPLRGNDTLKNTSSTGKKVFSDTAVDMKHNLSXTSYNAYCDLTKEKNTTAGGPSDNDPXKPPAKAHAAGWPPLRPFRKNIVHRSHSNDGEXSATSSICNANTGAPIENVSMHGAPYIRKVDWKTYKSYQE

SEQ ID NO: 31679 - protein, 126 aa, Glycine max
  Clone ID: TF_GmC382908_1.pep
KSGVGCLYVKVSMDGAPYLRKVDLKTYSNYIELSSALEKMFSCFTIGQCNSRALPGKDGLSESAFRDLVDGSEYVLTYEDKEGDWMLVGDVPWKMFTESCKKLRIMKGSEAIGLAPRGMEKFRSQY

SEQ ID NO: 31680 - protein, 41 aa, Glycine max
  Clone ID: TF_LIB4280-048-Q1-N1-E10.pep
KGDWKLVGDVPWGMFFLPCQRLGVFKSFYPLGLAPRGVLKC

SEQ ID NO: 31681 - protein, 92 aa, Glycine max
  Clone ID: TF_GmC573_6.pep
VRCTCHANLRKIDLNVYKSYPELLKALGNMFKCTFGEYSEREGYNGSEYAPTYEDKDGDWMLVGDVPWNMFVSSCKRLRIMKASEAKGLGCF

SEQ ID NO: 31682 - protein, 372 aa, Glycine max
  unsure (1)..(372): unsure at all Xaa locations
  Clone ID: TF_GmC183_1.pep
MSPPTLVTEEEGRSTVASDSSQSLDCFSQNGAGLKERNYLGLSDCSSVDSCASTVPSLCDEKKENMNLKATELRLGLPGFQSPEREPDLFSLSSPKLDEKPLFPLLPTKDGICSSGQKAVVSGNKRGFADTMDGFSQGKFAGNTGMNAVLSPRPSGAQPSAMKETPSKLSERPXCSTNNGTGHNHTGASISGSAPXASKAQVVGWPXHIRSFRKNSMATTTNKNNDEVDGKXPGAGALFVKVSMDGAPYLRKVXDLRNYTXTYQELSSALEKMFLSCFTLGQCGSRSSKGREMLSEXSKLKDLLHGSEYVXLTYEDKDGDWMLVXWDMFIDTCKRLKIMKGSDAIGLSSMARDINMNRCYLVLYPEEGWKEN

SEQ ID NO: 31683 - protein, 351 aa, Glycine max
  unsure (1)..(351): unsure at all Xaa locations
  Clone ID: TF_GmC1825_1.pep
MESRVLSRAGTLSSLPHLRKPPREAVSSASLVAVKAGIPGSTHASKQTRTHDKQTKQHYDRKGTQSEREGSYRNKEKNFQRGESKRVLLFLFYIYLGAKLCEFIDKPEMATMLTKEHGLNLKETELCLGLPGGGGGGGGGGEVETPRATGKRGFSETVDLKLNLHSKEDLNENLKNVSKEKTLLKDPAKPPAKAQVVGWTPVKXYRKNMMAVQKVSTEDVAEKTTSSTANSGXLSKVSMDGAPYLRKVDLXMYKSYXELSDALAXKMFSSFTMGNYGAQGMIDFMNESKLMDLLNSSEYVPSYEDKDGDWMLVGDVPWEMFVESCKRLRIMKGSEAIGLAPRAMEKCKSRS

SEQ ID NO: 31684 - protein, 211 aa, Glycine max
  Clone ID: TF_GmC573_8.pep
FAIVQVIYQEIDNSMGKYEKELNLEATELRLGLPGSDEPGKRSIVRSNKRSSTEASEEECISKGNMNSNGSDITSDDQDNLVPPAKAQVVGWPPVRSYRKNTLQQKKEEQGEGSGMYVKVSMAGAPYLRKIDLNVYKSYPELLKALGNMFKCTFGEYSEREGYNGSEYAPTYEDKDGDWMLVGDVPWNMFVSSCKRLRIMKASEAKGLGCF

SEQ ID NO: 31685 - protein, 263 aa, Glycine max
  Clone ID: TF_GmC22_3.pep
TQLIKHTRTITYLYLNITSLMEAERDKYKMINFEETELRLGLPLSGNETLKTTCSTGKRVFSDTAVDLKLNLSSTSNSASSDLTKEKNITAAAPPANDPAKPPAKAQVVGWPPVRSFRKNIVQRSNNNEGEKAATSSSNNVNTGAAFVKVSMDGAPYLRKVDLKLYKSYQELLDALAKMFSSFTIDKCGSQGMKDFMNESKLIDLLNGSDYVPTYEDKDADWMLVGDVPWEMFVESCKRLRIMKGSEAIGLAPRAVEKCKNRS

SEQ ID NO: 31686 - protein, 255 aa, Glycine max
  Clone ID: TF_GmC2301_7.pep
MANQNQRECAECLTWLCFLLITLSLSFFLFCFKVASVVCIYKEPKVAAFLFSLDQFHSLEDMGTLEQIDAPQTQSSSSSSSSIDSNNNPSRTRTPPSSSPSSSLCRNRTDLSTDLRLGLSISPSSQSESPFNSTRREESFDWPPIKSILRSTLVGKQSYLNQRPSLFVKVYMEGIPIGRKLNLMAHYGYDGLVKTLGHMFRTNILCPNSQPLNSGNFHVLTYEDQEGDWMMVGDVPWEMFLNSVRRLKITRADRC

SEQ ID NO: 31687 - protein, 71 aa, Glycine max
  Clone ID: TF_LIB4391-021-R1-N1-H2.pep
WMLVGNVPWDMFVTSFKRLKIIKGSKARGLGFSVLKNPTPKNFFEQRIKKSVLGVKGKTCLKTCVFGFKRF

SEQ ID NO: 31688 - protein, 147 aa, Glycine max
  Clone ID: TF_GmC26770_2.pep
TKIPPRVRTAERRTQKGKNGDEENHLVGWPPVKSWRRKELHQQHPARGRIRNDRIQANENQSRGPNSLYVKVNMEGVAIGRKINLRLFNSYQTLTSSLISMFAKYQKFEEVGESYTLTFQNEQDEWLQVGHVPWQSFIGTVRRLVIL

SEQ ID NO: 31689 - protein, 126 aa, Glycine max
  Clone ID: TF_GmC613_2.pep
GSRVYKSGSFGRSLDITKFTSYPELRSELARMFGLEGELEDPVRSGWQLVFVDQENDVLLLGDGPWPEFVNSVGYIKILSPQEVQQMGNNELELLNSVPIQRLSNGVCEDPRNLSTGITTVGSLNY

SEQ ID NO: 31690 - protein, 242 aa, Glycine max
  unsure (1)..(242): unsure at all Xaa locations
  Clone ID: TF_GmC435_1.pep
MWQRSHKSSEERKLELRLGPPGEESLNESIRKSNRERNESQFTLGCFSTQNFFTSDKQGPAVSKRTSSGPAVGWPPIRSFRKNIASGSTSKLPSGSHQQHQNVVPYKVASQKPTDKSGKGLFVKINMDGVPIGRKVDINAYDSYEKLSSAVDELFRGLLAEMKLSHIGSSQCXKAITGLLDGSGEFTLVYEDNEGDRMLVGDVPWHMFVSTVKRLRVLKSSELSAFTLGSKQDKIPLDSAMK

SEQ ID NO: 31691 - protein, 246 aa, Glycine max
  Clone ID: TF_GmC1199_2.pep
MVFEETELRLGLGLCLPGNGTTATTEAAAAELGVRKRGFSETETDETATVDLMLNLSPKEAAAADGADPREKPKTSPKEKTLLLPDPAKPPAKAQVVGWPPVRSFRKNMFAAQKSSGGEESEKSSPNASFVKVSMDGAPYLRKVDLKMYKSYPELSDALGKMFSSFTIGNCESQGFKDFMNESKLMDLLNSSDYVPTYEDRDGDWMLVGDVPWEMFVESCKRLRIMKGKEAIGLAPRAVEKCKNRS

SEQ ID NO: 31692 - protein, 174 aa, Glycine max
  Clone ID: TF_GmC870_3.pep
IRLEKGVPPEISSSMVSQTFEVPDMSFNSIDSTIDGSGFLNRGPWDLPPPPPPQQQQVQRIRTYTKVYKRGAVGRSIDITRYSGYEDLKQDLALRFGIEGQLEDLQRIGWKLVYVDHENDVLLVGDDPWEEFVNCVRCIKILSPQEVQQMSLDGDFGNGGLPYPAGSSSDGGNA

SEQ ID NO: 31693 - protein, 533 aa, Glycine max
  Clone ID: TF_GmC570_2.pep
GSSSGSIPPQQSFQSPNKNALLMTSLPQDSQFQQQIDQQASLLQRQQQQQTQLQSSPLQLLQQSLSQRASQQPQMTQMCQQNSSEQQPQLQMLQKLQQQQQQQQQQQQQQLLSTSSPLLQSQLLQQQNTHQQNQQFPQLPLSQGHQPQQLGNNAFSMEKLLNGNNYSTSSLMQTQQLSVNQPHNTQKSLTNTRAPSTLTDGDAPSCSTSPSTNNCQISPNLMKRNQHVPATLGGPSVLEPTNHLMQGLHSKSEMQIKHELPSVRGTDQLKFKGTVADQMEASSGTSYCIDPNNIHQNFPLPNFCMDGDVQSNPRNNLPFASNLDGLTPDTFLSRGYDSQKDLQNLLSNYGGAPRDIETELSTAALSPQPFGVPGIPFKPGCSSDIAINDPGVLNNGLWANQTQRMRTYTKVQKCGSVGRCIDVTRYKGYDELRHDLARMFGIEGQLEDPQRTEWKLVYVDHENDILLVGDDPWEEFVSCVQSIKILSSAEVQKMSLDGDLGHVPVPNQACSGTDNGNAWRGQYEDNSAASFNR

SEQ ID NO: 31694 - protein, 189 aa, Glycine max
  Clone ID: TF_GmC11115_2.pep
MSSESHAVDCNLKETELTLGLPGTKTTATKRGFSDTLPPSQNKILRPTSKFPTPNREQLVGWPPVRASRKNAMKSCCKLVKVAVDGAPYLRKVDLDMYDSYEHLMRELETMFCGLAIRNHLMNERKLMDPGNGIEYMPTYEDKDGDWMLVGDVPWKMFVESCKRIRLMISSEAVGLGPRSTSSKCTGST

SEQ ID NO: 31695 - protein, 204 aa, Glycine max
  Clone ID: TF_GmC573_12.pep
MGSFETELNLKATELRLGLPGCDETHDKSSSSSGSVVRSNKRSSPEPSVEESRCNSNGSSDSTTTSDHDEDSVQPAKVQVVGWPPIRSFRKNSLQQQKKVEQQGDGSGTYLKVSMAGAPYLRKIDLKVYNSYPELLMALQNLFKCTFGEYSEREGYNGSEYAPTYEDKDGDWMLVGDVPWNMFVSSCKRLKIIKGSEAKGLGCL

SEQ ID NO: 31696 - protein, 204 aa, Glycine max; identical to SEQ ID NO: 31695
  Clone ID: TF_GmC573_4.pep

SEQ ID NO: 31697 - protein, 114 aa, Glycine max
  Clone ID: TF_GmC183_5.pep
MDGAPYLRKVDLPNYTTYRELSSALEKMFSCFTLGQCGSHGAPGREMLSESKLKDLLHGSEYVLTYEDKDGDWMLVGDVPWDMFIDTCKRLKIMKGSDAIGLAPRAMEKSRSRC

SEQ ID NO: 31698 - protein, 206 aa, Glycine max
  Clone ID: TF_GmC573_9.pep
MGSFETELMNLKATELRLGLPGCDETNEKSSSSSGSVVRSNKRSSPEPSVEESRCNSNGSSDSTTTSDHDQDSAQPEKVQVVGWPPIRSFRKNSLQQQKKVEQLQGDGGGMYVKVSMAGAPYLRKIDLKVYNSYPELLAALQSLFTCTFGEYSEREGYNGSEYAPTYEDKDGDWMLVGDVPWNMFVSSCKRLKIIKGSEAKGLGCL

SEQ ID NO: 31699 - protein, 169 aa, Glycine max
  Clone ID: TF_GmC166_2.pep
VVLVKRRAISFYLPLLHPVEKNQSRIHRKNSMASQPLKNDTDAEAKSGCLYVKVSMEGAPYLRKVDLNSFTTYKDLSLALEKMFSCFTLSQCGSYGVSSRENLSESRLMDLLHGSEYVLTYEDKDGDWMLVGDVPWEMFTESCKRLRIMKSFEAIGLAPRAMEKCKSRN

SEQ ID NO: 31700 - protein, 64 aa, Glycine max
  Clone ID: TF_uC-gmflLIB3275P149e01a1.pep
ESAPVLFSLCPGLGPRDSRACSPILWISSGESILIYHTLLTNDLQKGYAGNPRTKKKQTNVSKT

SEQ ID NO: 31701 - protein, 81 aa, Glycine max
  Clone ID: TF_GmC166_4.pep
SGQCGSYGVSSRENLSESRLMDLLHGSEYVLTYEDKDGDWMLVGDVPWEMFTESCKRLRIMKSFEAIGLAPRAMEKCKSRN

SEQ ID NO: 31702 - protein, 195 aa, Glycine max
  Clone ID: TF_GmC590_1.pep
MAKEGLGLEITELRLGLPDAEHQVSVVNKKNEKKRAFSEIDDGVGDENSSSGGGDRKMETNKSQVVGWPPVCSYRKKNSMNEGASKMYVKVSMDGAPFLRKIDLGLHKGYSDLALALDKLFGCYGMVEALKNADNSEHVPIYEDKDGDWMLVGDVPWEMFMESCKRLRIMKKSDAKGFGLQPKGSLKGFIESAAK

SEQ ID NO: 31703 - protein, 133 aa, Glycine max
  Clone ID: TF_GmC1129_2.pep
QVHKSGSFGRSLDISKFSSYDELISELARMFGLEGQLEDPKTQRSGWQLVFVDRENDVLLLGDDPWQEFVNNVWYIKILSPLEVQQMGKVLSPSTSAPGDKLSTPVNSCDNYVSQQELRSSRNGMASMGSFHY

SEQ ID NO: 31704 - protein, 58 aa, Glycine max
  Clone ID: TF_jC-gmXLIB3563P059be05d1.pep
TNCNPLLLNNILPQYLIVQLFANIQARHSVNTSKTTFNPNYADRVQYESHAYLTYTKV

SEQ ID NO: 31705 - protein, 94 aa, Glycine max
  Clone ID: TF_jC-gmro02910066g04a1.pep
ARATLDGYDQLVDELEKMFDIKGQLQHRNKWETVFTDDEGDMMLVGDDPWPEFCNMVKRIFICSSQDVHKLSSGSKLPISSMGEIVISLNTTET

SEQ ID NO: 31706 - protein, 110 aa, Glycine max
  Clone ID: TF_GmC590_2.pep
KMYVKVSMDGAPLPVRIPGSTHASDSELVLALEKFFGCYGIREALKDAENAEHVPIYEDKDGDWMLVGDVPWEMFIESCKRLRIMKRSDAKGFDLQPKGSLKGFIEGVTK

SEQ ID NO: 31707 - protein, 272 aa, Glycine max
  unsure (1)..(272): unsure at all Xaa locations
  Clone ID: TF_GmC613_1.pep
EQSGKRLAIEPRNATASSPFALPEGAREGRPQTPNAQNGSALPPFPGREWTIEGSNDPQIHRWFXSHIEPSSLLMHNGMSSLKGVSSNSDSPTIPFQSSNYLNTTVPDSSLNPGMTHNIGESGFLQTPENGGQGNPTNKTFVKVYKSGSFGRSLDITKFTSYPELRSELARMFGLEGELEDPVRSGWQLVFVDQENDVLLLGDGPWPEFVNSVGCIKILSPQEVQQMGNNGLELLNSVPIQRLSNGVCDDYAGREDPRNLSTGITIVGSLNY

SEQ ID NO: 31708 - protein, 290 aa, Glycine max
  Clone ID: TF_GmC519_2.pep
MAQKNVLAESKRNDSTGTWHHMQTDMNSKSNSGNAMLRNQTEGSWLSSPHSSCPSHLFQDATDDSKSVSAWPVSKPHSSRLNNDHVLDQVDKESKVETATSYRLFGIDLIDHSRNSPSVEKASAQAGNAPKVTTEGCTSTLTRTDAGHLSDVPMASSKERKQEQQQVSPKETQSKQICRSRTKVQMQGVAVGRAVDLTMLDGYDQLINELEEMFDIKAQLQHRNKWEIVFTDDEGDMMLVGDDPWPEFCNMVRRIFICSSQDVKKMSCGSKLPISSVEDGTVISSDTTET

SEQ ID NO: 31709 - protein, 166 aa, Glycine max
  Clone ID: TF_GmC630_3.pep
NYATSVADERSVVRSLDHEKVLQTSQTHLKDIQAKSHSGSARSCTKVHKKGIALGRSVDLTKFSDYGELIAELDQLFEFGGLLTSPQKDWLIVYTDNEGDMMLVGDDPWQEFVAMVRKIYIYPKEEIQKMSPGTLSSKNEENQSASEGATDTQEIKCQLNNSASDT

SEQ ID NO: 31710 - protein, 213 aa, Glycine max
  Clone ID: TF_GmC1600_1.pep
MTTLLLRILHLTLNFLSPYAPANSSFTSLPITAPSQVVGWPPLGAYRMNSYNSHAKSPATEVFNSTLDKRASNSAGVRKSADGGSDSSNIISKEKGNLRTSLFVKVKMDGIPIGRKVDLGAHDSYETLAQTLEDMFDESTTVLTHKVGSNGEDHGTEVGTDGHSKLLDGSSDFVLTYEDKEGDWVLVGDVPWCYFAAPRLEEKNRRSNTSSYR

SEQ ID NO: 31711 - protein, 244 aa, Glycine max
  Clone ID: TF_GmC1199_3.pep
MVFEETELRLGLRLGLPGNGAAPTTEAAAELGVRKRGFSETETDETTSVDLMLNLSPKEASAAATTDGADPRENPKTSPKEKNLPLLDPAKPPAKAQVVGWPPVRSFRKNMFAAQKSSGGEESEKNSPNASFVKVSMDGAPYLRKVDLKMYKSYPELSDALGKMFSSFTIGNCESQGFKDFMNESKLMDLLNSSDYVPTYEDRDGDWMLVGDVPWEMFVESCKRLRIMKGKEAFGLAPRTGEKC

SEQ ID NO: 31712 - protein, 213 aa, Glycine max
  Clone ID: TF_GmC630_8.pep
SRELMSKQVSAKTCEAVKPKDGDCKLFGFSLISGPTLPEPSLSQRNVSEAADQMHLTAHQQRTSENDEKLDHSKGSRPVDDIVVDDQDRPLRTSQLHTKDVQAKPLSGSARSCTKVHKKGIALGRSVDLTKYSGYDELVAELDQLFEFGGELLSTKKDWLIVFTDNEGDMMLVGDDPWQEFCAMVRKIYIYPKEEIQKMSPGTLSSKNEENHS

SEQ ID NO: 31713 - protein, 557 aa, Glycine max
  Clone ID: TF_GmC1105_1.pep
MDFTQDLHCLLSEQRRKLAAAEAMELDLDFAFRLQLKEALAASLAAQPSSSSAAAAAIIEQPVVVIHDDDVNAMTLQREELARMEREMKDREQSEAETLKMREELCRRIHDEKVAREISAIPEKDWQQWGDNFEKPFGEGSSSSSLSREEGVVRVYFKGLVSEENVRGRKVVLSGIGVAICDLSDNLIFEVSKSLIGNGTSKVAAEIKALIEAFNAAIALDLKRVVYCCDYYPLFQFVSGKWPAKQRKIAILVDQVNLLQRKFSYCNPRFVARHDVKFAFKLARDAIESQSTRLAESGSRSLNETCVICLEETDVGQIFSVDGCQHRYCFSCMKQHVEVKLLHGMVPKCPHQGCKYELLVDSCQKFLTQKLTETMQQRKLEASIPVAEKIYCPYPTCSALMSKTEVLEYSKDITGQSEQSEPKICLKCRGLFCFNCKVPWHSGMTCNTYKRMNPIPPAEDLKLKFLASRSLWQQCLKCNHMIELAEGCYHMTCRCGYEFCYNCGAEWKDKKATCACPLWAEENIWLDDHEEELEEEEEDDDDDYDDYRSDYPDDYYY

SEQ ID NO: 31714 - protein, 101 aa, Glycine max
  Clone ID: TF_LIB4390-059-R1-K1-G3.pep
IEENNIREAECPNCRRLFCAQCRVPWHDNMPCEDFQKLNADERDKEDIMLMNLANQMQWKRCPRCRFYVAKSDGCMYMKCRGKTQKQLLLLIHYRKVASVY

SEQ ID NO: 31715 - protein, 1421 aa, Glycine max
  Clone ID: TF_GmC23542_1.pep
MVQRERVQEESIGCYEGQSIKCCSTFSSSREFDSRIAFMTDHCLLQHYMSDNNLSGVSCIIIDEAHERSLNTDLLLTLLKSLLCRRVEMRLIIMSATADAKQLSDYFFACGIFRVLGRSFPVDIKYVPSDYAGDSGSAVVASYVSDVVRMATEVHKTEKEGTILAFLTSQIEVEWACEKFQAPSAVALPLHGKLSSDEQFRVFQNYTGKRKVIFSTNLAETSLTIPGVRYVIDSGLVKDSRFDPGSGMNVLKVCWISQSSADQRAGRAGRTEPGVCYRLYTEADYQSMDLNQEPEIRRVHLGVAVLRILALGVKDVQGFDFVDAPSPSSIDMAIRNLIQLGAIELNNDVHDLTSEGWCLVRMGIEPRLGKLILGCFKHGLGREGIILAAVMANASSIFCRVGNEFDKQRSDCLKVQFCHCDGDLFTLLSVYKEWEALPRERKNKWCWENSINAKSMRRCQDTILELETCLEREHDVVTPSYWRWDPCMPSNHDKNLKRVILFSLAENVAMYSGCNQLGYEVAQTGQHVQLHPSCSLLVFAQKPSWVVFGELLSISNQYLVCVSAFDFQSLYDLCPAPLFDVSKMEERKLLMKTLSGLGCILLKRFCGKANCNLLALVSRIRKACMDERIFIEVNVDNNEIHLYASSNDMDIALGLVNDVLEYERKWLRTECMDKFLYHGSGFSPPVALFGSGAEIKHLELEKRSLSVDVCHPNINEIDDKELLMFFEKNTSGCICAVHKFTGNTRDEDRDKWGRITFMSPDIVRRAAELDGREFCGSSLKVVPSQLGGDKTFSFPAVKARISWPRRLSRGFAIVKCDIKDVDYILRDFYNLAVGGRYVRCEVGKKSMDSVVINGLDKELSEAEISDVLRTATTRRILDFFLVRGEAVGNPPCSALEEALLKEIYPFLPKRNPHISPCRVQVFAPEPKDAFMRALITFDGRLHLEAAKALEQIEGKVLPGCLSWQKIKCQQLFHSSLTFPTPVYRVIKEQLDEVLASFRNLKGLECNLDRTFNGSHRVKITANATRTVAEVRRPLEELLRGKTIEHDSLTPVVLQLMLSRDGFSLKNSLQQETGTYILFDRHNLNLRVFGSPNMVALAQEKVIQSLLSLHEEKQLEIHLRGRDLPPDLMKQMIKNFGPDLHGLKERVPGVDLTLNIRRHIIILHGSKELKPRVEEIVFEIARSSHHLVERFGNGPSCPICLCEVEDGYRLEGCGHLFCRMCLVEQFESAIKNQGTFPVCCTHRDCGDPILLTDLRSLLFGDKLEDLFRASLGAFVATSGGTYRFCPSPDCPSIYRVADPGSAGEPFVCRACYSETCTRCHLEYHPYLSCERYKEFKEDPDSSLIEWCRGKEQVKCCSACGYVIEKVDGCNHVECKCGKHVCWVVTFLLCKLYIMCSKAVQYGCIYPLNEPEERIDYKSISTN

SEQ ID NO: 31716 - protein, 163 aa, Glycine max
  Clone ID: TF_GmC136999_1.pep
PALRPLAAASSAPPTPRPLTTTIWAHQTTRTCNTVSPTSPNRLKCLQTFAQIHVKEGTVSNLKCPEAKCAIMIPSGLLKQLLDDTDYERWESMMLEKTLASMSDVVYCPRCETPCIEDEDQHAQCPKCYFSFCTLCRERRHVGIACMSLDMKLQILQVWYLNP

SEQ ID NO: 31717 - protein, 214 aa, Glycine max
  Clone ID: TF_GmC23542_3.pep
NGPSCPFCLCEVRDGYRLEGCGHLFCRLCLVEQFESAINNQGTFPVCCTHRDCGDPILLTDLRSLLFGDKLEDLFRASLGAFVATSGGAYRFCPPPDCPSIYRVADPESAGEPFVCGACYSETCTRCHLEYHPYLSCERYQEFKEDPDSSLKEWCRGKEQVKCCSACGYVIEKVDGCNHVECKCGKHVCWVCLEFFSTSNDCYDHLRTIHLTII

SEQ ID NO: 31718 - protein, 405 aa, Glycine max
  Clone ID: TF_GmC43002_1.pep
IRLEATQNKIRRVFAFTDSELLHDQITFGKKLEMPLLTALRERILELANNFEDFVLNLIPSTDLEQPLHLAKVAIGLVTFPVNGEILLKNCSICCDDKPVPIMITLKCLHTFCSHCLRAYADGKVQSCQFPIRCPQPRCKYCMSVTECRSFLPFISFGSLEKALSEENIDHSDRIYCPFPNCSVLLDPHECSSARASSSSQSDNSCIECPVCRRFICVDCKVPWHSSMSCLEYQNLPEKERDVSDITLHRLAQNKRWKRCQQCRRMIELTQGCYHMTCWCGYEFCYSCGAEYREGQQTCQCAYWDEDNSEDSVAHSLQESEQWAWETFNSLSMIVDAYSDQERSQLALIQRFLAGGFSLSDHNPYQSPPRCTDSYVDPMKDLHQLPWLERFVSVISDNYYDDYIQ

SEQ ID NO: 31719 - protein, 541 aa, Glycine max
  unsure (1)..(541): unsure at all Xaa locations
  Clone ID: TF_GmC1406_1.pep
MDVYASSDEDYHYDSDHEDSVEAYENDENYALLSSKGTTTKVITKESLLAAQKEDLRRVMDMLSVREQHARTLLIFHRWDVENLFEVLVDKGKSFLFAEAGVSVDEHRNSDSPVPPAFMCYICMEEVPSSKTTRMDCGDXFCNISWIEHFIVKINEGQSKRIRCMEHKCNSICDDALVRTLLSREHPHMAEKYERFLLESYIEDNKRVKWCPSTPHCGNAIRVEDDELCEVECSCGVQFCFSCLSEAHSPCSCLMWELWAKKCRDESETVNWITVHTKPCPKCHKPVEKNGGCNLVSCICGQAFCWLCGGATGREHTWSSIAGHSCGRYKEQEKTAERAKRDLYRYMHYHNRYKAHTDSFKIESKLKETIQGKIAISEEKDSTLRDYSWVNNGLSRLFRSRRVLSYSYAFAFYMFGDELFKDEMTDAQREIKQNLFEDQQQQLEANVEKLSKILEEPFETFSDDKVVEIRMQILNLSTIIDKLCQKMYECIENDLLGSLNLGIHSIAPYKSKGIERASELSVGWNNGVNNTGKCLLGGLFE

SEQ ID NO: 31720 - protein, 583 aa, Glycine max
  unsure (1)..(583): unsure at all Xaa locations
  Clone ID: TF_GmC6405_2.pep
MESEDDMHDANDIESLDDDFYSGETEDAPLDYYSDDDADDYFDDAERIESRRPEQNFTILKESDIRLRQEDDVARVATVLSISRVSASLLLRHHNWSVSRVHDTWFADEERVRKAVGLLEKPIVQHPNARELTCGICFENYPRARIEMASCGHPYRISCWEGYISTSINDGPGCLMLSPDPXCGAATGRSSRFGSRSDEDKQKYARYLLRSYIEDNKKSKWCPAPGCEYAVTFDAGSTGNYDVSCLCSYGFCWNCTEEAHRPVDCGTVAKWILKNSAESENMNWILANSKPCPKCKRPIEKNHGCMHMTCTPPCKFEFCWLCVGAWSDHGERTGGFYACNRYEAAKQEGVYDDTERRREMAKNSLERYTHYYERAFSCXSRQKALADLQQMQTVHIEKLSDIQCQPESQLKFITEAXTKIECRRVLKWTYAYGFYLPEHEHAKKQFFEYLQGEAESGLERLHQCAEKELQPFLSADDPSREFNDFRTKLAGLTSVTRNYFENLVRALENGLSDVGSNGAAFSKATSSKNAAGSSKGRAGRGKGTFRTSLSSKLNDDSHWYCEHCTYANVKSASTCQMCYQQRR

SEQ ID NO: 31721 - protein, 333 aa, Glycine max
  Clone ID: TF_GmC215703_1.pep
MLNPEPPPPPPPMMVPPATPMNRETTSLRKKNRLRTRTRIPPFDVDSSFFTTPISLQGTTKSNAISVEQYDGVSASASSPVHVINLSDTEDDDEVRILNFTPINTSFGKRSKKSSSKGECSNSASFVCEICTETKTARDSFSIIGCHHVYCNSCVAQYVESKLEENIVSIPCPVPGCRGLLEADDCREILAPRVFDRWGKALCEAVIAAEEKFYCPFADCSVMLIRGIEENNIREAECPNCRRLFCAQCRVPWHDNMPCEDFQKLNADERDKEDIMLMNLANQMQWKRCPRCRFYVPKSDGCMYMKCRCGNAFCYNCGAPNLTSSHSCSYCFR

SEQ ID NO: 31722 - protein, 266 aa, Glycine max
  Clone ID: TF_LIB4203-002-R1-K1-F3.pep
LIWINKEEMIFQIPWKHAAKHGWDINKDACLFRSWAIHTGRYKAGEKEPDPKTWKANFRCAMNSLPDIEEVKDQSRNKGSSAVRVYRMLPPLTRNQRKERKSKSSRDTKSKTKRKLCGDVSPDTFSDGLSSSTLPDDHSSYTTQGYLGQDLDMERDITPALSPCVVSSSLSEWHMQMDIIPDSTTDLYNLQVSPMPSTSEAATDEDEEGKIAEDLMKLFEQSEWQPTHIDGKGYLLNEPGTQLSSVYGDFSCKEEPEIDSPRGDIG

SEQ ID NO: 31723 - protein, 171 aa, Glycine max
  unsure (1)..(171): unsure at all Xaa locations
  Clone ID: TF_LIB4167-057-R1-K1-E4.pep
MEDPNQAQEGSSQKKMGRGKIEIKRIENTTNRQVTFCKRRNGLLKKAYELSVLCDAEVALVVFSTRGRLYEYANNSVRATIERYKKANAAASNAESVSEANTQFYQQESSKLRRQIRDIQNLNRHILGEALGSLSLKELKNLEGRXLEKGLSRVRSRKEIVLQNHNNYLGA

SEQ ID NO: 31724 - protein, 206 aa, Glycine max
  Clone ID: TF_GmC1907_2.pep
MVRRKIPIKKIDDVTARQVTFSKRKSGLFKKARELSLLCDAEIALIVFSPGGKLFDYGSSSMQKVIERHILRSELNLEKLDQSCPTEQVRCNYADLNKEFADRTREMRQLNGEELQGLTLRELQKLEERLDSSLNRVYKAKVENFIKEIGILKEKGKKLMEDNMLIKQMIKLPRNEICSVQRHEHEQGQLFDTSLTLGLPFPAGSK

SEQ ID NO: 31725 - protein, 211 aa, Glycine max
  Clone ID: TF_GmC1907_1.pep
MVRRKIPIKKIDNVTARQVTFSKRKSGLFKKARELSLLCDSEIALIVFSPGGKLFDYASSSMQKVIERHILWSELNLEKLDQSCPTEQLRCNYADLNKEFGDRIREMRQLNGEELQGLALRELQKLEERLVSSLNRVYKAKVENFTREIDILKQKGNKLMEDNRLMKQRIKPRNEICSVQRHEHEQGRSFDTSLTLGLSFPAGSKYRVSEQ

SEQ ID NO: 31726 - protein, 123 aa, Glycine max
  unsure (1)..(123): unsure at all Xaa locations
  Clone ID: TF_GmC940_2.pep
APEAHPLLDAKEETNMLKQEIQTLQKGIRHLFGGGIXTMPIDELQVLEKNLETWIYHIRSMKMNIMLQEIQALKDKEGTLKAANKYLHDKIVENTAISNFAQFATDTSNSYPLIIQDEVFQLY

SEQ ID NO: 31727 - protein, 157 aa, Glycine max
  unsure (1)..(157): unsure at all Xaa locations
  Clone ID: TF_jC-gmXLIB3563P005ca07a2.pep
MVRGKTQMKRIENETSRQVTFSKRRNGLLKKAFELSVLCDAEVALIIFSTRGRLYEFSSSRCSSINKTVERYQRKIEDLGVSNKGIHENTQHLKEVDMSMAKKIEHLEDSRRKLLGDELDKCSIDELQQLENQLERSLDKIRATXNQLFRKRIEKLK

SEQ ID NO: 31728 - protein, 138 aa, Glycine max
  unsure (1)..(138): unsure at all Xaa locations
  Clone ID: TF_LIB4390-047-R1-K1-F9.pep
MGRGRVVLERIENKINRQVTFSKRRSGLLKKAFELSVLCDAEVGLIIFSSRGKLFQYSSTDITKIIERYRQCRYSKSHWXIHWNTIHRHFQGEDLEPLSFKDLQSLEKQLDITLALTRQHQTKKLMARADELREKVSC

SEQ ID NO: 31729 - protein, 566 aa, Glycine max
  unsure (1)..(566): unsure at all Xaa locations
  Clone ID: TF_GmC109_1.pep
MPTVSVGRDRLFAALGKTYTQEEFEDLCFSFGIELDDVTTEKAIVRKEKHLDEEEADEDEEVIYKIEVPANRYDLLCLEGLAQALRVFCEFQEIPTYRLSKISKDAMLKMHVKPETSLIRPYVVCAVLRGITFDKARYNSFIDLQDKLHQNICRRRTLVAIGTHDLDTLEGPFTYEALSSGMANFNLLKFHNFYTITAEIAFLNSXVNPSKGYTYARLLDHLFVKQELLTPLSPVSHRIYSRIVXESCHAALXATATGWIEQLFLXFFIQTNREMKNSVIEWSKIPVEFCGFEDIYCVGQSDVPVILSDTHAIIFYKIKLLGAFCFVHLYVIDNINIPDPCSFVELKIEIVDNKAPKIFPASSVLLSLDHLSERIGKXVALIGFTEVLTFILCSKKENFAMLNRKDDKSKAAIIGNPRSSDFEAVRTSLMPGILKTVAHNKDHPKPIKIFEVGDIAVLHEQRDVGAKNLRQLAALYCGANAGFEIIHGLVDRVMEKNGVPFVSPGDKSGYYIERSDEPEFLAGRQARIIYKGKHIGTFGIVHPEVLNNFDIPDPCSFVELNIESFL

SEQ ID NO: 31730 - protein, 186 aa, Glycine max
  Clone ID: TF_GmC1414_1.pep
MGKKKVEIKRIENKSTRQITFSKRRNGLMKKARELSILCDAKVALLIFSSTGKLYELCNGDSLAEVVQQYWDHLGASGTDTKSQELCFEIADIWSGSAFSQMIKRHFGVSELEHLSVSDLMELEKLTHAALSRIRSAKMRLMMESVVNLKKKIEALEKTNDVNNVVTRSIDCDQTDGVTHNLFPGL

SEQ ID NO: 31731 - protein, 166 aa, Glycine max
  unsure (1)..(166): unsure at all Xaa locations
  Clone ID: TF_GmC1834_3.pep
MVRGKTQMRRIENATSRQVTFSKRRNGLLKKAFELSVLCDAEVALIIFSPRGKLYEFASSSMQDTIERYRRHNRSAQTVNRSDEQNMQHLKQETANLMKKIELLEASKRKLLGEGLGSCSLEELXQIEQQLERSVSNVPARKNQVYKEQLDQLKEKERALYAENAR

SEQ ID NO: 31732 - protein, 152 aa, Glycine max
  Clone ID: TF_GmC59564_1.pep
MGRGKIEIKKIENLNSRQVTFSKRRNGLLKKAKELSVLCDAEVAVIIFSSTGKLYEFSNTSMEHTLSRYSKGAESDSAEQPIDVPPTDVMAVEPDTNLLMEEITKLRSAYLRMMGKELDGLSLKELQQLENQLSEGMQSVKDKKEQVLVEQL

SEQ ID NO: 31733 - protein, 125 aa, Glycine max
  unsure (1)..(125): unsure at all Xaa locations
  Clone ID: TF_GmC182_5.pep
MGRGRVELKRIENKINRQVTFAKRRNGLLKKAYELSVLCDAEVALIIFSNRGKLYEFCSSSSMLKTLERYQKCSYGAVEVTKPAKELESSYREYLKLKARFESLQRTQRNLLGEDLGPLNTXELE

SEQ ID NO: 31734 - protein, 119 aa, Glycine max
  unsure (1)..(119): unsure at all Xaa locations
  Clone ID: TF_GmC7654_3.pep
RRRRLCKTLPFDKLGFWKPVLPAARWELRFKASRRANPPHEGHQRHVPLGGRGPLLLVGKRTAGARVASSPDSDLEAFSHNPTHGSFAPLAFQPSAMTNCANQRFLSYXVKLLLRHCHQ

SEQ ID NO: 31735 - protein, 125 aa, Glycine max
  Clone ID: TF_jC-gmX3050018F05sg15D17b1.pep
LIAARRRQKGGGELEGLSPKNPQKQEQQHESALKHTRPRKNQLTHETIPEPHKKEKALQEQNNTLAKKTKEKEKALAQQAQPERIGDEGDQTSSAQEPQPPVTTNIRTPTQTRGEGDNQRTPTPT

SEQ ID NO: 31736 - protein, 128 aa, Glycine max
  Clone ID: TF_GmC1905_2.pep
KPCGIFAFQDILGEGLSSLSLKELKNLESRLEKGLSRVRSRKHETLFADIEFMQKREIELQNHNNFLRAKIAENERAQQRQQDMIPGTECESTIPNSQSYDRNFFPVNLIDSNNNQYSRQDQTALQLV

SEQ ID NO: 31737 - protein, 211 aa, Glycine max
  Clone ID: TF_700889004_FLI.pep
MVRGKTQLRRIENATSRQVTFSKRRNGLLKKAFELSVLCDAEVALIIFSPRGKLYEFASSSMQDTIERYRRHNRSAQTVNRSDEQNMQHLKQETANLMKKIELLEASKRKLLGEGLGSCSLEELQQIEQQLERSVSSVRARKNQVYKEQIDQLKEKERALYAENARLCEQYGGIQPQPATKDPKEIQPYAESSPSSEVETELFIGLLRSSY

SEQ ID NO: 31738 - protein, 211 aa, Glycine max; identical to SEQ ID NO: 31737
  Clone ID: TF_GmC1834_1.pep

SEQ ID NO: 31739 - protein, 123 aa, Glycine max
  unsure (1)..(123): unsure at all Xaa locations
  Clone ID: TF_GmC182_2.pep
ASWAIGFIKASEVKTQFMLDXLSDLQSKEQMLVEANRSLTVKLEEINSRNHYRQSWEAGDQSMPYGGGGPENSHSHQGFFQPLECNPTLHIGPDYRYNAVASDQITATTQPQQVSGFIPGWML

SEQ ID NO: 31740 - protein, 222 aa, Glycine max
  Clone ID: TF_GmC132_1.pep
MGRGKIEIKRIENTTNRQVTFCKRRNGLLKKAYELSVLCDAEVSLIVFSSRGRLYEYSNNNIRSTIERYKKACSDHSSASTTTEINAQYYQQESAKLRQQIQMLQNSNRHLMGDALSTLTVKELKQLENRLERGITRIRSKKHEMLLAEIEYFQKREIELENENLCLRTKITDVERIQQVNMVSGPELNVIQALASRNFFNPNMLDGGTVYPQTDKKILHLG

SEQ ID NO: 31741 - protein, 222 aa, Glycine max; identical to SEQ ID NO: 31740
  Clone ID: TF_GmC132_2.pep

SEQ ID NO: 31742 - protein, 220 aa, Glycine max
  Clone ID: TF_LIB5068-015-A1-XP1-H9.pep
RGIENTTNRQVTFCKRRNGLLKKAYELSVLCDAEVALVVFSSRGRLYEYANNSVRGTIERYKKACAASTNAESVSEANTQFYQQEASKLKRQIRDIQNLNRHILGEGLSSLSLKELKNLESRLEKGLSRVRSRKHETLFADIEFMQKREIELQNHNNFLRAKIAENERAQQRQQDMIPGTECESTIPNSQSYDRNFFPVNLIDSNNNQYSRQDQTALQLV

SEQ ID NO: 31743 - protein, 71 aa, Glycine max
  Clone ID: TF_uC-gmflminsoy115h02b1.pep
QTPDCRLTACKLGLGHMKGEDINSVNYKELMALEDALETGLVSDRDKQGAVYWMSMRHDKILEEENMELTF

SEQ ID NO: 31744 - protein, 275 aa, Glycine max
  unsure (1)..(275): unsure at all Xaa locations
  Clone ID: TF_GmC157106_1.pep
MYLFLNPPVTFFCFRVRFLFLGLALLRIASYVGELSTKKMGRGRVQLKRIENKTSQQVTFFKRRSGLLKKASEISVLCDAQVALIIFSTKGKLFEYSSERSMEDLLERYERCSHTALAGANNVESPGFWSFEHIKLTAKVEVLERNIMNFFGNDLDPLSLKELHSLEQQIETSLKRIRTRKNQVMNQSVSDLHKKARTLQVQNRWLGKMKEKAKTVTEGPHNGPETLGFDSSTLNLSSPQLPPPPSPXRLVPSLTLSETMQGRNTSWKKRVKAQT

SEQ ID NO: 31745 - protein, 244 aa, Glycine max
  Clone ID: TF_GmC734_1.pep
MGRGRVQLKQIENKISRQVTFSKRRTGLRKKANEISVLCDAQVALIVFNAKGKLFEYSSESSMENVLERYERHTHIGKLVGDGDESQGNWSLQCFKLTGKVEVLERNLRNFVGEDLDPLNLRELQSLEHQLETAIKRIRTRKNQVMNESISDLQKKARQLQEQNGILTKKIKEKGKEVVERPHCGPETLGLTCPPELQRQQRVFPSLTLCETLQAGHLEEVVEARTVPTASTHIPPWMLHPFTR

SEQ ID NO: 31746 - protein, 225 aa, Glycine max
  unsure (1)..(225): unsure at all Xaa locations
  Clone ID: TF_GmC528_1.pep
MVRGKTQMKRIENETSRQVTFSKRRNGLLKKAFELSVLCDAEVALIIFSTRGRLYEFSSSXSINKTVERYQRKIEDLGVSNKGIHENTQHLKEVDMSMAKKIEHLEDSRRKLLGDELDKCSIDELQQLENQLERSLDKIRATKNQLFRKRIEKLKEEEKCLLEVNKRLREQYRIERQRCLSDQDVEFATKKEGEEVETELFIGRPERRMPLKLKPTTYSAHAYIA

SEQ ID NO: 31747 - protein, 246 aa, Glycine max
  Clone ID: TF_GmC176_1.pep
MGRGKVELKRIENKINRQVTFAKRRNGLLKKAYELSVLCDAEVALIIFSNRGKLYEFCSGHSMAKTLERYHRCSYGALEVQHQPEIETQRRYQEYLKLKSRVEALQQTQRNLLGEELEHLDVNDLEQLERQLDSSLKQIRSNKTQQMLDQLSDLHRKEEMLLETNNILRNKLEEINVALQPTWEAREQNAPYNCHPPQTEGYYETATAHCSSTLRIGYDSSGLNEAGGAAGASAQNASEFMHGWMN

SEQ ID NO: 31748 - protein, 119 aa, Glycine max
  Clone ID: TF_LIB4127-088-Q1-N1-F3.pep
MGRGRVQLKRIENKINRQVTFSKRRAGLLKKAHEISVLCDAEVALIVFSHKGKLFEYATDSCMEKILERYERYAYAERQLVANDSESQGNWTIEYTRLKAKIDLLQRNHRHYMGEDLGS

SEQ ID NO: 31749 - protein, 208 aa, Glycine max
  Clone ID: TF_GmC1602_1.pep
MGRGKIEIKRIENSSNRQVTYSKRKNGILKKAKEITVLCDAQVSLIIFAASGKMHDYISPSTTLIDILERYHKTSGKRLWDAKHENLNGEIERLKKENDSMQIELRHLKGDDINSLNYKELMALEDALETGLVSVREKQMDVYRMLRRNDKILEEENRELNFLWQQRLAEEGAREVDNGFDQSVRDYNSHMPFAFRVQPMQPNLQERI

SEQ ID NO: 31750 - protein, 254 aa, Glycine max
  Clone ID: TF_GmC182_4.pep
MGRGRVELKRIENKINRQVTFAKRRNGLLKKAYELSVLCDAEVALIIFSNRGKLYEFCSSSSMLKTLERYQKCSYGAVEVSKPAKELESSYREYLKLKARFESLQRTQRNLLGEDLGPLNIKELEHLERQLDSSLKQVRSTKTQFMLDQLSDLQTKEQMLVEANRSLTVKLEEINSRNHYRQSWEAGDQSMPYGGGGPENSHSHSHSQGFFQPLECNPTLHIGPDYRYNAVASDQITATTQPQQVSGFIPGWML

SEQ ID NO: 31751 - protein, 236 aa, Glycine max
  Clone ID: TF_GmC4870_6.pep
MGRGRVVLERIENKINRQVTFSKRRSGLLKKAFELSVLCDAEVALIIFSSRGKLFQYSSTDINKIIERYRQCRYSKSQTDDSLEHDSQSSYHEFLKLRAKYESLELTQRHFQGEELEPLSFKDLQSLEKQLDITLALTRQHQTKKLLARADELREKVHKLEDLNKQLESKEKDEFSSLILDNNNYIQVHATQGDQFESGTTLNTCRFQRQDSKEKAIDTKTDGSQSSHNKNKGWLL

SEQ ID NO: 31752 - protein, 243 aa, Glycine max
  Clone ID: TF_GmC791_1.pep
MGRGKIEIKLIENPTNRQVTYSKRRNGIFKKAHELSVLCDAKVSLIMFSKNNKMHEYISPGLTTKKIIDQYQKTLGDIDLWHSHYEKMLENLKKLKDINNKLRRQIRHRIGEGLDMDDMSFQQLRTLEEDMVSSIGKIRERKFHVIKTRTDTCRKKVKSLKQMNGNLLLELKEKCVIHPQFLLHDEGDEESAAAAAAAAVALANGASTLYAFCHQHHSHLNLFSHHSNGEEQPFKTDHDLRLA

SEQ ID NO: 31753 - protein, 234 aa, Glycine max
  Clone ID: TF_GmC1762_1.pep
MARGKIQIKRIENTTNRQVTYSKRRNGLFKKANELTVLCDAKVSIIMFSSTGKLHEYISPSTSTKQFFDQYQMTLGVDLWNSHYENMQENLKKLKDVNRNLRKEIRQRMGDCLNDLGMEDLKLLEEEMDKAAKVVRERSCMTWREKQKHVTHRIVTQRKKFNNEKEVHNRLLRDLDARAEDPRFALIDNGGEYESVIGFSNLGPRMFALSLQPSHPSAQSGAAGSDLTTYPLLF

SEQ ID NO: 31754 - protein, 241 aa, Glycine max
  Clone ID: TF_GmC1499_2.pep
MGRGRVELKRIENKINRQVTFAKRRNGLLKKAYELSVLCDAEVALIIFSNRGKLYEFCSSSSMLKTLERYQKCNYGAPEANVSTQEALELSSQQEYLRLKARYEALQRSQRNLMGEDLGPLSSKELESLERQLDSSLKQIRSIRTQFMLDQLSDLQRKEHFLGESNRDLRQRLEEFQINPLQLNPSAEDMGYGRHPGQPQGHALFQPLECEPTLQIGYHPDPVSVVTEGPSMNNYMAGWLP

SEQ ID NO: 31755 - protein, 243 aa, Glycine max
  Clone ID: TF_GmC951_1.pep
MAFPDPSMSVSPQRKMGRGKIEIKRIENTTNRQVTFCKRRNGLLKKAYELSVLCDAEVALIVFSSRGRLYEYANNSVKATIERYKKASSDSSGAGSASEANAQFYQQEADKLRQQISNLQNNNRQMMGDSLGSLTAKDLKNLETKLEKGISRIRSKKNELLFAEIEYMQKREIDLHNNNQLLRAKIAESERNHHNMAVLPGGSNYDSMQSSQQQFDSRGYFQVTGLQPNNQYARQDQMSLQLV

SEQ ID NO: 31756 - protein, 246 aa, Glycine max
  unsure (1)..(246): unsure at all Xaa locations
  Clone ID: TF_GmC1905_1.pep
MEYRNEAIREEYSQKGTGXGKIGVKRIKHTNELSSNLRANRRNGLLKKXAYELSVLCDAEVALVVFSSRGRLYEYANNSVRGTIDRYKKACAASTNPESVXSEANTQFYQQEASXKLKRQIRDIQNLNRHILGEALSSLSLKELKNLESRLEKGLSRVRSRKHETLFADIEFMQKREIELQNHNNFLRAKIAEHEKAQQRQQDMIPGNVCESTIPPQSYDRNFFPVNLIDSNNQYSNQDQTALQLV

SEQ ID NO: 31757 - protein, 227 aa, Glycine max
  Clone ID: TF_GmC130282_1.pep
MVREKIQIKKIDNATARQVTFSKRRRGLFKKAEELSVMCDADVALIIFSSTGKLFEYSSSSMKEILERHHLHSKNLARMEQPSLELQLVENSNCSRLSKEVAEKSHQLRQLRGEDLQGLNIEELQQLERSLETGLGRVIEKKGEKIMSEITDLQRKGMLLMEENERLKRHVAGIINGQRHGGAESENFVMDEGQSSESVTYVCNSTGLPQDYESSDTSLKLGLPYSG

SEQ ID NO: 31758 - protein, 224 aa, Glycine max
  Clone ID: TF_GmC1362_1.pep
MVRGKTQMKRIENATSRQVTFSKRRNGLLKKAFELSVLCDAEVALIIFSPRGKLYEFASSSIQESIERYRRHTKHVNPTTFRSVEQNMQHLKQEAENMMKKIDLLEAAKRKFLGEGLGACSIEELQRIEQQLERSLSNVRARKVFKEQIEQLKEKEKALLDENAKLTENARLSEKHDIHLQPATKNQNVNQPQCNAESSSSSDVETELFIGLPDTRARHISHHV

SEQ ID NO: 31759 - protein, 128 aa, Glycine max
  Clone ID: TF_GmC1499_5.pep
GEDLGPLSSKELESLERQLDSSLKQIRSTRTQFMLDQLSDLQRKEHLLSEANRSLRQRQLEGYQINPLQLNPGVEEMGYGRHPAQTHGEALFQQMECEPTLQIGYQPDPVSVVTAGPSMSNYMAGWLP

SEQ ID NO: 31760 - protein, 158 aa, Glycine max
  Clone ID: TF_GmC4870_4.pep
GRGRVVLERIENKINRQVTFSKRRSGLLKKAFELSVLCDAEVGLIIFSSRGKLFQYSSTDITKIIERYGQCRYSKSHTGDSLEHDSQSAYHEFLKLRAKYESLERTQRHFQGEDLEPLSFKDLQSLEKQLDITLALTRQHQTKKLMARADELREKVSC

SEQ ID NO: 31761 - protein, 245 aa, Glycine max
  Clone ID: TF_GmC175_1.pep
MGRGRVELKRIENKINRQVTFSKRRNGLLKKAYELSVLCDAEVALIIFSSRGKLYEFGSVGTTNTIERYQRSSFTPQDEHVECETQSWYQEVSKLKAKYESLQRTQRHLLGEDLGPLNIKELQNIEKQLEGALAQARQRKTQIMIEQMEELRRRERHLGDMNKQLRLKLEAEGFNLKATESLLSFTSAAGNSGFHFQQPPQTNPIDYQQPEPFLQIGYHQYVQSEASNVPKSMACETNFMQGWIL

SEQ ID NO: 31762 - protein, 232 aa, Glycine max
  Clone ID: TF_GmC1805_1.pep
MGRGKVVLERIQNKINRQVTFSKRRNGLLKKAFELSVLCDAEIALVIFSSRGKLFQYSSTDINRIIEKYRQCCFNMSQTGDVAEHQSEQCLYQELLVLRVKHESLQRTQRNLLGEELEPLSMKELHSLEKQLDRTLAQARKHLTQKLVSRIDELHGKVHSLEQANKHLESQERGKCTQICEGSPNGHILQDKQVNQFEYGTAGSFRLQQEQTTASKGKEIETIEDWLRPKQS

SEQ ID NO: 31763 - protein, 207 aa, Glycine max
  unsure (1)..(207): unsure at all Xaa locations
  Clone ID: TF_GmC1110_1.pep
MGRGKIEIKRIENSSNRQVTYSKRKNGILKKAKEISVLCDAQVSLIIFGVSGKMHEYISPSTTLIDVLDRYQRASGKTLWDAKHENLSNEIDRIKKENDSMQIELRHLKGEDITSLNYKELMALEDALENGLSGVREKKMEVHRMFKRNDKILEEQNKELNFLLQQHLALEGVGNXMDNGFNEIKRVFNSHMQRAASLKQPNLKERI

SEQ ID NO: 31764 - protein, 243 aa, Glycine max
  Clone ID: TF_GmC138_1.pep
MGRGRVQLKRIENKINRQVTFSKRRGGLLKKAHEISVLCDAEVALIIFSHKGKLFEYATDSCMEKILERHERYAYAERQLVANDSETQENWTIEYTRLKAKIDLLQRNHRHYMGEDLASMSLKELQSLEQQLVTGIKNIRTRRNDLMSESISELQKKEKRIQEENNTLAKKIKEKEQAVAQQAAQWEQPNYRVDTSFMPQQQPLPTSLNICGNNYCQEAAPELGRNGLDLTLEPLYSCNLGCF

SEQ ID NO: 31765 - protein, 132 aa, Glycine max
  Clone ID: TF_GmC1362_2.pep
EAANMMKKIGLLEAAKRKFLGEGLGACSIEELQWIEQQLERSLSNVRTRKIQVFKEQIEQLKEKEKVLLDENVKLTENGRLSEKHGINLQTETKKQNVNQPQYNAGSPSSDVETELIIGLPDTRTRRIVHQV

SEQ ID NO: 31766 - protein, 248 aa, Glycine max
  Clone ID: TF_GmC182_1.pep
MGRGRVELKRIENKINRQVTFAKRRNGLLKKAYELSVLCDAEVALIIFSTRGKLYEFCSTNSMLKTLERYQKCSYGAVEVSKPGKELESSYREYLKLKARFESLQRTQRNLLGEDLGPLNTKDLEQLERQLDSSLKQVRSTKTQFMLDQLADLQNKEHMLVEANRSLTMKLEEINSRNQYRQTWEAGEQSMSYGTQNAHSQGFFQPLECNPTLQIGSDYRYNPEASEQQLAATTQAQQVNGFIPGWML

SEQ ID NO: 31767 - protein, 73 aa, Glycine max
  unsure (1)..(73): unsure at all Xaa locations
  Clone ID: TF_GmC1905_11.pep
VVEAAVKRERTMAYAFSHQWRACSSQGLGNYELGKASWSWSXKDRWIVALPNSIIFISRKRPNLKDKSQTFRI

SEQ ID NO: 31768 - protein, 94 aa, Glycine max
  Clone ID: TF_LIB3028-045-Q1-B1-E5.pep
TLERYQKCNYGAPEDNVATKEALELSSQQEYLRLKARYEALQRSQRNLMGEDLGPLSSKELESLERQLDSSLKQIRSIRTQFMLDQLSDLQRKV

SEQ ID NO: 31769 - protein, 241 aa, Glycine max
  Clone ID: TF_GmC1499_3.pep
MGRGRVELKRIENKINRQVTFAKRRNGLLKKAYELSVLCDAEVALIIFSNRGKLYEFCSSSSMLKTLERYQKCNYGAPEANVSTREALELSSQQEYLKLKARYEALQRSQRNLMGEDLGPLSSKELESLERQLDSSLKQIRSTRTQFMLDQLSDLQRKEHLLSEANRSLRQRLEGYQINPLQLNPGVEEMGYGRHPAQTHGEALFQQMECEPTLQIGYQPDPVSVVTAGPSMSNYMAGWLP

SEQ ID NO: 31770 - protein, 233 aa, Glycine max
  Clone ID: TF_GmC791_2.pep
MGRGKIEIKLIENPTNRQVTYSKRRNGIFKKAHELSVLCDAKVSLIMFSKNNKMHEYISPGLTTKRIIDQYQKTLGDIDLWRSHYEKMLENLKKLIDINNKLRRQIRHRIGEGLDMDDMSFQQLRTLEEDLVSSIGKIRERKFHVIKTRTDTCRKKVKSLEQMNRDLLFELEKCAIHPQFILHDEGDEESAVALANGASTLYAFCHQHHSHLNLPSHHSHGEEPFKTDDLRLA

SEQ ID NO: 31771 - protein, 183 aa, Glycine max
  unsure (1)..(183): unsure at all Xaa locations
  Clone ID: TF_LIB4165-007-Q1-K1-B5.pep
MGRGKIEIKLIENPTNRQVTYSKRRNGIFKKAHELSVLCDAKVSLIMFSKNNKMHEYISPGLTTKRIIDQYQKTLGDIDLWRSHYEKMLENLKKLIDINNKLRRQIRKLIGGVVLCELERHRIGEGLDMDDMSFQQLRTLEEDXVSSIGKIRERKFHVXQNTTDTCRXKVKSLXQMNRDLLFE

SEQ ID NO: 31772 - protein, 96 aa, Glycine max
  Clone ID: TF_LIB4127-114-Q6-K1-G8.pep
LEGLFETGLGRVIKKKGEKIMSEIPDLQRKGMLLMEENERLKRHVAGIINGQRHGGAESENFVMDEGQSSESVTYVCNSTGPPQDFESSDTSLKLG

SEQ ID NO: 31773 - protein, 148 aa, Glycine max
  Clone ID: TF_700738341_FLI.pep
MQDTIERYRRHNRSAQTVNRSDEQNMQHLKQETANLMKKIELLEASKRKLLGEGLGSCSLEELQQIEQQLERSVSNVRARKNQVYKEQIDQLKEKERALYAENARLCEQYGIQPQPATKDPKEIQPYAESSPSSEVETELFIGLPRSI

SEQ ID NO: 31774 - protein, 221 aa, Glycine max
  unsure (1)..(221): unsure at all Xaa locations
  Clone ID: TF_GmC1499_1.pep
MGRGRVELKRIENKINRQVTFAKRRNGLLKKAYELSVLCDAEVALIIFSNRGKQYEFCSGSSMLKTLERYQKCNYGAPEDNVATKEALELSSQQEYLRLKARYEALQRSQRNLMGEDLGPLSSKELESLERQLDSSLKQIRSIRTQFMLDQLXDLQRKEHFLGESNRDLRQRLEEFQINPLQLNPSAEDMRVWTPYRYHPDPVSVVTEGPSMNNYMAGWLP

SEQ ID NO: 31775 - protein, 159 aa, Glycine max
  Clone ID: TF_GmC138_2.pep
MGRGKVQLKRIENKINRQVTFSKRRSGLLKKAHEISVLCDAEVALIVFSHKGKLFEYATDSCMEKILERHERYAYAERQLVANDSETQGNWTIEYTRLKAKIDLLQRNHRHYMGEDLASMSLKELQSLEQQLDTAIKNIRTRRNDLMYASISELQKRRK

SEQ ID NO: 31776 - protein, 215 aa, Glycine max
  Clone ID: TF_GmC297_2.pep
MGRGRVEFKRIENKINRQVTFSKRRSGLLKKAREISVLCDADVAFIAFYTKGKLLDYSNQPCSERILEPCERDSYAERELVGDDQPPNENWVIEHEKLRLGWRYYSRNQRNLMGEDLDRLNLTGLQRWEHQLDSALKHIRSRKNQAMNESISELQKKDRTLREHNSLLSKKIKEKEKELTPQEQEGLQNNMDVSSVLVTQPLESLTIGLVSFCDV

SEQ ID NO: 31777 - protein, 200 aa, Glycine max
  Clone ID: TF_GmC1414_3.pep
MGKKKVEIKRIENKSTRQITFSKRRNGLMKKARELSILCDAKVALLIFSSTGKLYELCNGDSLAEVVQQYWDHLGASGTDTKSQELCFEIADIWSGSAFSQMIKRHFGVSELEHLSVTDLMELEKLVHAALSRIRSAKMRLMMESVENLKKKEHILRNENELLEKQIEAQKKADDVNNVVTRFIDYDQTDRVTHNLLPGL

SEQ ID NO: 31778 - protein, 241 aa, Glycine max
  unsure (1)..(241): unsure at all Xaa locations
  Clone ID: TF_GM459L07rgnA2.C1.o17.ma.pep
MGRGRVELKRIENKINRQVTFAKRRNGLLKKAYELSVLCDAEVALIIFSNRGKLYEFCSSSSMLKTLERYQKCNYGAPEANVSTREALVMELSSQQEYLKLKARYESLQRSQRNLMGEDLGPLSSKELESLERQLDSSLKQIRSTRTQFMLDQLSDLQRKEHLLSEANRSLRQRLEGYQINPLQLNPGVEEMGYGRNPAQTHGEALFQQMECEPTLQIGXTAGPSMSNYMAGWLPYLPCMK

SEQ ID NO: 31779 - protein, 227 aa, Glycine max
  Clone ID: TF_GmC1762_2.pep
MARGKIQIKRIENTTNRQVTYSKRRNGLFKKANELTVLCDAKVSIIMFSSTGKLHEYISPSTSTKQFFDQYQMTLGVDLWNSHYENMQENLKKLKDVNRNLRKEIRQRMGDCLNDLGMEDLKLLEEEMDKAAKVVRERKYKVITNQIDTQRKKFNNEKEVHNRLLHDLDAKAEDPRFALIDNGGEYESVIGFSNLGPRMFALSLQPSHPSAQSGAAGSDLTTYPLLF

SEQ ID NO: 31780 - protein, 157 aa, Glycine max
  Clone ID: TF_GmC951_2.pep
MAFPDPSMSVSPQRKMGRGKIEIKRIENTTNRQVTFCKRRNGLLKKAYELSVLCDAEVALIVFSSRGRLYEYANNSVKATIERYKKASSDSSGAGSASEANAQFYQQEADKLRQQISNLQNNNRQMMGDSLGSLTAKDLKNLETKLEKGISRDSVQK

SEQ ID NO: 31781 - protein, 141 aa, Glycine max
  Clone ID: TF_GmC1468_1.pep
TWFIISTPICLLLEANLSSWKINCDITLIAIIYSGFFSTGLSSLVHTWGLHLKGPVYISIFKPLSIVVAAALSVIFLGDALYFGSVVGAVILSFGFYAVLWGKAKEEELTVVDFDDIRPPSNTKSPLLQSYKVKDEDNQNI

SEQ ID NO: 31782 - protein, 244 aa, Glycine max
  Clone ID: TF_GmC176_2.pep
MGRGKVELKRIENKINRQVTFAKRRNGLLKKAYELSVLCDAEVALIIFSNRGKLYEFCSGHSMAKTLERYHRCSYGALEVQHQPEIETQRRYQEYLKLKSRVEALQQTQRNLLGEELEHLDVKDLEQLERQLDSSLKQIRSNKTQQMLDQLADLHRKEEMLLETNNILRNKLEEINVALQPTWETREQNAPYNYHPSQSEGYYETAHCNSTLRIGYDSSGLNEAGGAAGTSAQNASEFMNGWMN

SEQ ID NO: 31783 - protein, 153 aa, Glycine max
  unsure (1)..(153): unsure at all Xaa locations
  Clone ID: TF_jC-gmXLIB3564P107dc10b1.pep
EERAPTHPYGCEKTTEGHRINAQYYQQESVSEQKYRCCKSNRHLMXVVSRVTEKELKQQENRLQRGGARGRSKXHEMLWAEIEYFQKREIELENENLCLRTKITDVERIQQVNMGSGPELNVIQALASRNFFNPNMLDGGTVYPQTDKKILHL

SEQ ID NO: 31784 - protein, 223 aa, Glycine max
  Clone ID: TF_GmC4870_8.pep
MGRGRVVLERIENKINRQVTFSKRRSGLLKKAFELSVLCDAEVGLIIFSSRGKLFQYSSTDITKIIERYRQCRYSKSHTGDSLEHDSQSAYHEFLKLRAKYESLERTQRHFQGEDLEPLSFKDLQSLEKQLDITLALTRQHQTKKLMARADELREKEKDEFSSLILDNNNYIQMHATQVDQFESETALNTCRFQHQEVVSKEKAIDTRTEHSQSSHNKNNGWL

SEQ ID NO: 31785 - protein, 215 aa, Glycine max
  unsure (1)..(215): unsure at all Xaa locations
  Clone ID: TF_GmC698293_1.pep
MARGKVQLKKIEDTTSRQVAFSKRRSGLLKKAYELSVLCDAEVAVIVFSQNGRLYEFSSSDMTKILERYREHTKDVPGSKILSTIXIQQLKLDSASLAKKIELLEHSKRELLGQSVSSCSYDELKGIEEQLQISLQRVRQRKTQLYTEQIDQLRSQESNLLKENAKLSAMWQRAEKSSQQQWPRHTQAEAEPHCSSSQSLDVDTELFIGLPKQQC

SEQ ID NO: 31786 - protein, 243 aa, Glycine max
  Clone ID: TF_GmC134_1.pep
MEDPNQAPEGSSQKKMGRGKIEIKRIENTTNRQVTFCKRRNGLLKKAYELSVLCDAEVALVVFSTRGRLYEYANNSVRATIERYKKANAAASNAESVSEANTQFYQQESSKLRRQIRDIQNLNRHILGEALGSLSLKELKNLEGRLEKGLSRVRSRKHETLFADVEFMQKREIELQNHNNYLRAKIAEHERAQQQQSNMNMSGTLCESLPSQSYDRNFFPVNLIASDDQQQYSRQDHTALQLV

SEQ ID NO: 31787 - protein, 257 aa, Glycine max
  Clone ID: TF_GmC134_2.pep
PGRPTRPPTRPYGCEKTTEGEAQEGSSQKKMGRGKIEIKRIENTTNRQVTFCKRRNGLLKKAYELSVLCDAEVALVVFSTRGRLYEYANNSVRATIERYKKANAAASNAESVSEANTQFYQQESSKLRRQIRDIQNLNRHILGEALGSLSLKELKNLEGRLEKGLSRVRSRKHETLFADVEFMQKREIELQNHNNYLRAKIAEHERAQQQQSNMMSGTLCESLPSQSYDRNFFPVNLIASDDQQQYSSQDHTALQLV

SEQ ID NO: 31788 - protein, 203 aa, Glycine max
  Clone ID: TF_GmC940_1.pep
MARGKVQLKRIENPVHRQVTFCKRRAGLLKKAKELSVLCDAEIGLFIFSAHGKLYELATKGTMQGLIERYMKFTRGAQPEAAAPEAHPLLVAKEETNALKQEIQTLQKGISYLFEGGNKTMAIDELQLLEKNLETWIYHIRSMKMNIMLQEIQALKDKEGTLKAANKYLHDKIVENTAISNFAEFATDTSYPLIVQDGGFQLY

SEQ ID NO: 31789 - protein, 243 aa, Glycine max
  Clone ID: TF_GmC694_1.pep
MAFPNQSMSSESPQRKMGRGKIEIKRIENTTSRQVTFCKRRNGLLKKAYELSVLCDAEVALIVFSNRGRLYEYANNSVKASIERYKKASSDSSSGGRSASEANAQFYQQEAAKLRVQISNLQNHNRQMMREGLSTMNGKDLKNLETKLEKGISRIRSKKNERLFAEIEHMKKREIHLNNDNQLLRAKIAAGERSHHNVNGLSGSISYESMQSQFDSRGFFQVTGLQPNNNQYAGQDNMSLQFV

SEQ ID NO: 31790 - protein, 282 aa, Glycine max
  unsure (1)..(282): unsure at all Xaa locations
  Clone ID: TF_GmC1013_2.pep
MGRGKIVIRRIDNSTSRQVTFSKRRNGLLKKAKELAILCDAEVGVMIFSSTGKLYDFASSSMKSVMDRYSKSKEEPCQLGSSASEIKFWQREAAMLRQQLHNLQESHRRKMMGEELSGLTVKELQNLENQLEISLHGVRMKKDQLLMGEIQELNRKGNLIHQENVELYKKVYGTQDDNETNRDSVLTNGLGIGEDLQXACESPAKPATATTLQGTFRNYKIGIAIALIHLQDVCFTIAIKKNGLRFKPQCLRINVAYRPQTNWLKDFNLKLLEKVKATLACM

SEQ ID NO: 31791 - protein, 243 aa, Glycine max
  Clone ID: TF_GmC4870_1.pep
MGRGRVVLERIENKINRQVTFSKRRSGLLKKAFELSVLCDAEVGLIIFSSRGKLFQYSSTDITKIIERYRQCRYSKSHTGDSLEHDSQSAYHEFLKLRAKYESLERTQRHFQGEDLEPLSFKDLQSLEKQLDITLALTRQHQTKKLMARADELREKVHKLEDLNKQLESKVFSLNNHEKDEFSSLILDNNNYIQMHATQVDQFESETALNTWFQHQEVVSKEKAIDTRTEHSQSSHNKNNGWL

SEQ ID NO: 31792 - protein, 146 aa, Glycine max
  Clone ID: TF_uC-gmflLIB3275P070a02a1.pep
SVLCDAQVSLIIFGVSGKMHEYISPYTTLIDVLDRYKRASGKTLWDAKHENLSNEIDRLKKENDSMQIELRHLKGEDITSLNYKELMALEDALENGLSGVREKKMEVHRMFKRNGKILEEQNKELSFLLQQHLAVEGIGNMHEQWI

SEQ ID NO: 31793 - protein, 386 aa, Glycine max
  unsure (1)..(386): unsure at all Xaa locations
  Clone ID: TF_GmC87_1.pep
MKWLNKLFRGGPNRGRGGRHLHEPAEESRVWGAPSRALDDRARAQKEKEDLGHAMALSSAEDLKRPNAHQGYNWGEDTGDDYSKAPRDTLNSSAHPPFAPTPFYPHEYRRICGGCNQEIMYGNCLGCMDTYFHPNCFRCHSCGYPITELCFQFIPINAAGLIEYRCHPFWSQXYCPSHEYDNTARCCSCERLEPLNIKYYRLEDGRSLCLECMESAIMDTGDCQPLYHSIRDYYEGMQMRIDQQIPMLLVEREALNEAIVGEKNGAILAHELMHAWLRLNGYRNLNPEVEEGICQVLSYMWLESEVMPSFQNMPSTSTSAASSYSSSKKGAKSHVENKLGEFFKNQIANDSSPAYGGGFRAANEAVNRYGLRRTLDHIHWTGFFPV

SEQ ID NO: 31794 - protein, 64 aa, Glycine max
  unsure (1)..(64): unsure at all Xaa locations
  Clone ID: TF_LIB3242-630-P2-J2-F5.pep
MAFAGTTXKCMACDKTVYLVDKLTADNRVYHKACFRCHHCIGTLMLIIYNSFEGVXYCMPHCDQ

SEQ ID NO: 31795 - protein, 171 aa, Glycine max
  Clone ID: TF_GmC7454_3.pep
QSLNLESPPRYGNENMYQPPIQYFPLGSRICAGCYTEIGFGRYLNCLNAFWHPECFRCRACNLPISDYEFSTSGNYPYHKSCYKESYHPKCDVCKHFIPTNPAGLIEYRAHPFWIQKYCPTHEHDGTPRCCSCERMESQEAGYIALKDGRKLCLECLDSSIMDTNECQPLH

SEQ ID NO: 31796 - protein, 79 aa, Glycine max
  unsure (1)..(79): unsure at all Xaa locations
  Clone ID: TF_uC-gmflLIB3275P088g01b1.pep
MATAGTTQNCKACDKAVYLVDTLTADNRVLHKACFRCHHCQGTLKLSNYDSFEVVLYMXPHFDQLGKRTGSLDKSFEGT

SEQ ID NO: 31797 - protein, 250 aa, Glycine max
  unsure (1)..(250): unsure at all Xaa locations
  Clone ID: TF_GmC5988_8.pep
MGWFTKLLKGSDHKILRGQYHGKYGEDRIWDNHHSSMDDLTDIEKEDIDRAIALSLSEEDHKGKKVVDEELCKIDDDEEDEHLVKVHLDEDERLAKIQQEEEERLAKIQQEDEHLAKIQQEEEERLAKIQQEDECLAKIQQEDERLAKAQLEEDEQLARAIQESLKIGSPPQYDNGSSILSFPHLFPPGYRICAGCKTEIGQGRFLSCMGGVWHPECFCCHACHLPITDYEFCMCRNGTYHXWCCGEKGG

SEQ ID NO: 31798 - protein, 461 aa, Glycine max
  Clone ID: TF_GmC7403_1.pep
MKWFGKIFNIGSSRGRGGGRHLQQPVEENMVWPAPARSLDDRARSRKEEEDLDHAIALSLGENFKRPTGYRWRTGTDEDYAKALQDRRFSSAHPPYAPVPFYPRGYGVPLHNRTCGGCNQEILYGNCLGVGHSYFHPDCFRCHSCRYPITEREFSLSGKHPYHKSCFKELTHPKCEVCHQYIPINAAGLIEYRCHPYWNQKYCPSHEYDNTARCCSCERLESRGERYYRLEDGRILCFECMESAITDTGECQPLYHSIRDYYEGMNMKIDQQVPMLLVGREALNEAIVGEKNGFHHSPETRGLCLSEEQTVTSVYRWPRIGGHRLISMRSQAQRLPRKCEVTAILVLYGLPRLLTGAILAHELMHAWLRLKGYQNLSLEVEEGICQVLSYMWLDAEVMSCARTTPSTSSSASSSSYSNSSKKGVKSLVENKLGGVGWWHLGAAMVLGGGFGERQLRLLLGR

SEQ ID NO: 31799 - protein, 224 aa, Glycine max
  unsure (1)..(224): unsure at all Xaa locations
  Clone ID: TF_LIB4390-036-R1-K1-B7.pep
GVYSSSRSERKSGFMKWLSKLFRGGSNRGRGCRHLHEPAEESIVRGAPSRALDDRGRAQKEKEDLGLVLALSSAEDLKRPNGYNWGEDTGDDYSKAPHDTLNSSAHPPFAPTPFYPHPHKYRRVCGGCNQEIMYGNCLGCMDTYFHPNCFRCHSCGYPITEREGSIHITICFQFIPINAAGLIEYRCHPFWSXKYCPSHEYDNTARCCXCERWEPXDIXYYRLE

SEQ ID NO: 31800 - protein, 361 aa, Glycine max
  unsure (1)..(361): unsure at all Xaa locations
  Clone ID: TF_GmC7454_1.pep
MYLPPIQYFPMGSWIWALCYTEIGYGRYLNCLNAFWHPECFRCRACNLPISDYEFSTSGNYPYHKSCYKESYHPKCDVCKHFXHPFWIQKYCPTHEHDGTTRCCSCERMESQEAGYIVLKYGRKLCLECLDSAIMDTNECQPLHADIQRFYESLNMKLDQQIPLLLVERQALNEAREGEKNGHYHMPETRGLCLSEELSTFSRRPRLGTTMDMRAQPYRPTTRCDVTAILILYGLPRLLTGSILAHEMMHAWLRLKGYRTLSQDVEEGICQVLSHMWLESELSSASGSNFVSASSSSASHTSRKGKRPQFERKLGEFFKHQIESDISPVYGGGFRAGQKAVSKYGLQRTLHHIRMTGTFPY

SEQ ID NO: 31801 - protein, 90 aa, Glycine max
  unsure (1)..(90): unsure at all Xaa locations
  Clone ID: TF_uC-gmroLIB3258P128b11b1.pep
MAFAGTTQTCMACDKTDYLVDQLTPDNRAFHKACLRRHYCIGTLRLSNYNCFDGVLYCKPHSDQLFKRAGSXLDKSCQGAPRIAKPHKNL

SEQ ID NO: 31802 - protein, 216 aa, Glycine max
  unsure (1)..(216): unsure at all Xaa locations
  Clone ID: TF_GmC1586_1.pep
MSFTGTTDKCKACDKTVYVVDMLTLEGIPYHKNCFRCSHCKGYLTMNTYSSMDGVLYCKPHFEQLFKESGNFSKNFQTAKSSDKQNETNKAPNRLSSMFSGTLDKCSVCXKTVYPLEKMTLEGECYHKNCFRCAHAGCHLTHSSYAALDGVLYCRHHFQQLFMEKGNYHHVLQSANHKKNVTPEPAEPAAEGDEEPPKPEESDSEEHTEEKPQNEA

SEQ ID NO: 31803 - protein, 198 aa, Glycine max
  Clone ID: TF_GmC102_1.pep
MSFIGTQQKCKACEKTVYPVDQLSADGTAYHKACFRCSHCKGTLKLSNYSSMEGVLYCKPHYEQLFKESGSFSKNFQSPAKLADKTTPELTRSPSKAASMFSGTQEKCATCGKTAYPLEKVTVEGQAYHKSCFKCSHGGCPITPSNYAALEGILYCKHHFSQLFKEKGSYNHLTKSASVKRAAAATAAATTAASVPES

SEQ ID NO: 31804 - protein, 207 aa, Glycine max
  Clone ID: TF_GmC102_4.pep
MNLDLKAIAMSFIGTQQKCKACEKTVYPVDQLSADGTAYHKACFRCSHCKGTLKLSNYSSMEGVLYCKPHYEQLFKESGSFSKNFQSPAKLADKTTPELTRSPSKAASMFSGTQEKCATCGKTAYPLEKVTVEGQAYHKSCFKCSHGGCPITPSNYAALEGILYCKHHFSQLFKEKGSYNHLNKSASVKRAAAATAAATTAASVPES

SEQ ID NO: 31805 - protein, 192 aa, Glycine max
  Clone ID: TF_GmC5796_1.pep
MMASFAGTTQKCKACEKTVYLVDQLTADNKIYHKSCFRCYHCKGTLKLSNYCSFEGVLYCKPHFDQLFKKTGSLDKSFEGIPRTARLERSTDQVQTNSKVSNLFAGTQEKCVACKKTVYPIEKVAVDGTSYHKACFRCTHGGCVISPSNYVAHEHRLYCRHHHTQLFKQKGNFSQLDKQENDEGVTENTITE

SEQ ID NO: 31806 - protein, 196 aa, Glycine max
  Clone ID: TF_GmC1184_2.pep
MAFAGTTQKCMACDKTVYLVDKLTADNRVYHKACFRCHHCKGTLKLSNYNSFEGVLYCRPHFDQLFKRTGSLDKSFEGTPKIAKPEKTGEEKPAATKVSSMFGGTRDKCAGCQKTVYPTEKVTVNGTPYHKSCFKCTHGGCVISPSNYIAHEGKLYCKHHHIQLIKEKGNLSQLEGDHEKSTEEEKINGEVVAAET

SEQ ID NO: 31807 - protein, 176 aa, Glycine max
  unsure (1)..(176): unsure at all Xaa locations
  Clone ID: TF_GmC102_3.pep
MSFIGTQQKCKACEKTVYPVDQLSADGTAYHKACFRCSHCKGTLKLSNYSSMEGVLYCKPHFEQLFKESGSFSKNFQSPAKLADKTTHELTRSPSKAASMFSGTQEKCATCGKTAYPLEKVTVEGQAYHXSCFKCSHXXGCPITPSNYAALEGIXYCSXHFXQLFRRKELYHLTSL

SEQ ID NO: 31808 - protein, 164 aa, Glycine max
  unsure (1)..(164): unsure at all Xaa locations
  Clone ID: TF_GmC102_5.pep
MSFIGTQQKCKACEKTVYPVDQLSADGTAYHKACFRCSHCKGTLKLSNYSSMEGVLYCKPHFEQLFKESGSFSKNFQSPAKLADKTTHELTRSPSKAASMFSGTQEKCATCGKTAYPLEKVTVEGQAYHKSCFKCSHGXGCPITPSNYAALEGILYCRNTSPAF

SEQ ID NO: 31809 - protein, 151 aa, Glycine max
  Clone ID: TF_21600799.pep
PRAEFGTRQPFPSGSFFEKGGMPYCQSCFQGTFSSKCAGCGNMASGQLINALGQKWHSQCFCCSYCRRPFNGLPYFEKDGKPYCEQHYHTSAGSICAGCRTAIVGRCVDALGQKWHPEHFVCSYCMNPLSGGGYTEQHGSPYCQECFANLF

SEQ ID NO: 31810 - protein, 84 aa, Glycine max
  Clone ID: TF_LIB3107-008-D2_FLI.pep
MAFAGTTQKCMACDKTVYLVDKLTADNRVYHKACFRCHHCKGTLKLSNYNSFEGVLYCRPHFDQLFKRTGSLDKSFEGTPKIAK

SEQ ID NO: 31811 - protein, 189 aa, Glycine max
  Clone ID: TF_GmC102_2.pep
MSFIGTQQKCEACDKTVYPVDQLSADGTAYHKACFKCSHCKGTLKLSNYSSMEGVLYCKPHYEQLFKETGSFKKNFQSPAKQAVKTTPELTRSPSKAASMFSGTQEKCATCGKTAYPLEKVTVEGQAYHKSCFKCSHGSCPITPSNYAALEGVLYCKHHFSQLFKEKGSYNHLIKSASIKREANSVPQA

SEQ ID NO: 31812 - protein, 196 aa, Glycine max
  Clone ID: TF_GmC1061_2.pep
MAFAGTTQKCMACDKTVYLVDKLTADNRVFHKACFRCHHCKGTLKLSNYNSFEGVLYCKPHFDQLFKRTGSLDKSFEGTPKIAKPEKNLEEKPAAAKVSSMFGGSREKCAGCQKTVYPTEKVTVNGTPYHKSCFKCCHGGCVISPSNYIAHEGKLYCKHHHVQLIKEKGNLTQLEGDNEKSATNGKINGEEVSAET

SEQ ID NO: 31813 - protein, 257 aa, Glycine max
  Clone ID: TF_GmC1586_2.pep
FGSRFNSLLSEVCAFLFNSSLFLRHPRREPKIKNKKINTINKGEKTNMSFTGTLDKCTACDKTVYVVDLLTLEGIPYHKNCFKCSHCKGCLTMCTYSSMDGILYCKTHFEQLFKESGNFSKNFAKSSEKQNELNRTPSKLSSMFSGTQDKCSVCTKTVYPLEKMTLEGECFHKTCFRCAHAGCPLTHSNYAALDGVLYCRVHFAQLFMEKGNYNHVLQAAAHRRTGSSTPPLLEEPSQEPAPPASHEDQTEEETPLE

SEQ ID NO: 31814 - protein, 125 aa, Glycine max
  Clone ID: TF_LIB5119-034-A1-PF1-B9.pep
MPNPKCEACGKTAYPLESVTALEKTFHKGCFKCTTCKTTLNLKNFKGYEGQIYCIPHTPTPKATAVTDSVLIKAAVNAPKKKAEGLAIAHRGARELAPAAADFTVNDTNVDQSTENQPDQSHIQY

SEQ ID NO: 31815 - protein, 188 aa, Glycine max
  unsure (1)..(188): unsure at all Xaa locations
  Clone ID: TF_GmC102_6.pep
MSFIGTQQKCKACEKTVYPVDQLSADGTAYHKACFRCSHCKGTLKLSNYSSMEGVLYCKPHYEQLFKESGSFSKNFQSPAKLADKTTPELTRSPSKAASMFSGTQEKCATCGKTAYPLEKVTVEGQAYHKSCFKCSHGGCPITPSNYAALXGILYCKHHFSQLFKEKGELYHLTKSASVKRAAAATAA

SEQ ID NO: 31816 - protein, 131 aa, Glycine max
  Clone ID: TF_GmC5796_4.pep
MASFAGTTQKCTACEKKVYWVEQLTADNKVYHKSCFRCHHCKGTLKLSNYCSFEGVLYCKPHFHQLFKMTGSLDKSFEGVPRSVRVERSADQVQTNKVSRLFSGTQEKCVGCKKTVYPIEKVAVDGKSYHK

SEQ ID NO: 31817 - protein, 226 aa, Glycine max
  Clone ID: TF_GmC1603_1.pep
MAFSGTQQKCKACDKTVHLVEGLSVDGAAYHKNCFRCSHCNGLLAISNYSSTEGVLYCKVHFEQLFKETGAYPKKSQSSGKPPLELNRAPSKLSAFFSGTQEKCSKCKKTVYPLEKLTVEGEFYHKSCFRCAHGGCFLTPSTYAALDGYLYCKPHFSQLFKEKGSYSYLSKQASLKKSEMQQQEQEAVEKATTTTMMIAQSQSQRRPTTTTKEAEQADDDHSEQEH

SEQ ID NO: 31818 - protein, 318 aa, Glycine max
  unsure (1)..(318): unsure at all Xaa locations
  Clone ID: TF_GmC5988_6.pep
MGWFTKLLKGSDYKILRGQYHGKYGEDRIWDNHHSSMDDLTDIEKEDIDRAIALSLSEEDHKGKKVVDYDSQSEDEELCKIDDEEDEHLVKVHLEEEERLAKIQQEEEERLAKIQQERFSTRRXCLAKIQQEDERLAKAQLEEDEQLARAIQESLKIGSPPQYDNGSSILSFPHLFPPGYRICAGCKTEIGQGRFLSCMGGVWHPECFCCHACHLPITDYEFSMSSNRPYHKSCYREKHHPRCDVCKNFIPTNSSGLIEYRAHPFWLQKYCPSHELDGTSRCCSCERMEPRDTKYLLLDDGRKLCLECLDSSIMDTHE

SEQ ID NO: 31819 - protein, 71 aa, Glycine max
  Clone ID: TF_uC-gmropic020d02b1.pep
MMASFAGTTQKCKACEKTVYLVELLTADNKIYHKSCFRCYHCKGTLKLSNYCSFEGVLYCKPHFDQLFKKT

SEQ ID NO: 31820 - protein, 196 aa, Glycine max
  Clone ID: TF_GmC1061_1.pep
MAFAGTTQKCMACDKTVYLVDKLTADNRVFHKACFRCHHCKGTLKLSNYNSFEGVLYCKPHFDQLFKRTGSLDKSFEGTPKIAKPEKNLEEKPAAAKVSSMFGGTREKCAGCQKTVYPTEKVTVNGTPYHKSCFKCCHGGCVISPSNYIAHEGKLYCKHHHVQLIKEKGNLTQLEGDNEKSATNGKINGEEVSAET

SEQ ID NO: 31821 - protein, 196 aa, Glycine max
  Clone ID: TF_GmC1061_3.pep
MAFAGTTQKCMACDKTVYLVDKLTADNRVFHKACFRCHHCKGTLKLSNYNSFEGVLYCKPHFDQLFKRTGSLDKSFEGTPKIAKPEKNLEEKPAAAKVSSMFGGTRDKCAGCQKTVYPTEKVTVNGTPYHKSCFKCCHGGCVISPSNYIAHEGKLYCKHHHVQLIKEKGNLSQLEGDNEKSATNGKINGEEVATET

SEQ ID NO: 31822 - protein, 196 aa, Glycine max
  Clone ID: TF_GmC1184_1.pep
MAFAGTTQKCMACDKTVYLVDKLTADNRVYHKACFRCHHCKGTLKLSNYNSFEGVLYCRPHFDQLFKRTGSLDKSFEGTPKIAKPEKTGEEKPAATKVSSMFGGTRDKCAGCQKTVYPTEKVTVNGTPYHKSCFKCTHGGCVISPSNYIAHEGKLYCKHHHVQLIKEKGNLSQLEGDHEKSAEQEKINGEVVAAET

SEQ ID NO: 31823 - protein, 526 aa, Glycine max
  Clone ID: TF_GmC1928_1.pep
MGWFTKLLKGSNRKSSGGRYHGKYEDDRISDNLDCSADDLMDIEKEEIGRAIALSLSEADKKGKKVIEDDSESEDDELCPLSDEEAESVGEVQQDEDDHHAKIQQDEDKHLDEVQLEEDEQLARAIQESLSISSPPRSETDSLFQPFAHLFPPVYRICSGCNAEIGHGRFLSCMGGYWHPECFCCHACKLPITDYEFSMSGNRRYHKSCYKELHHPRCDVCKNFIPPNSAGLIEYRAHPFWLQKYCPSHERDGTPRCCSCQRLESVDTKYLLLDDGRKLCLECLDSAIMDTHECQPLYVEIQEFYEGLHMKIEQQVPMLLVERQALNEAMEGEKNGHHHLPETRGLCLSEEQTVPTILRRPRIGAGYQLIDMITEPFRLVRRCEVTAILVLYGLPRLLTGSILAHEMMHAWLRLKGYGNLRPEVEEGICQVLAHMWLESEIIPGTGDEGASSSSSSSSSSPSSSSSSKKGKRSDFEKKLGKYFKHQIESDSSAAYGDGFREGNQAVAKYGLRRTLDHIRLTGSFPY

SEQ ID NO: 31824 - protein, 85 aa, Glycine max
  unsure (1)..(85): unsure at all Xaa locations
  Clone ID: TF_700681638H1.pep
SSAFAGTREKCXGXQXTTVYPTERVTVNNTMXHKSCFKCCHGGCTISPSNYIAHXGKLYCKHHHIQLIKEXRGTSASLRMTTEDI

SEQ ID NO: 31825 - protein, 192 aa, Glycine max
  unsure (1)..(192): unsure at all Xaa locations
  Clone ID: TF_jC-gmst02400027e04a1.pep
MMASFAGTTQKCKACEKTVYLVDQLTADNKIYHKSCFRCYHCKGTLKLSNYCSFEGVLYCKPHFDQLFKKTGSLDKSFEGIPRTARLERSTDQVQTNSKVSNLFAGTQEKCVACKKTVYPIEKVAVDGTSYHKACFRCTHGXCVISPSNYVAHEHRLYCRHHHTQLFKQKGNFSQLDKQENDGGVTEKHITE

SEQ ID NO: 31826 - protein, 179 aa, Glycine max
  Clone ID: TF_GmC1463_1.pep
MASFGGTTQKCMACAKTVYLVDKLTADSRVYHKACFRCHHCRNTLKLSNYCSFEGVLYCRPHYDQLYKRTGSLDKSFEGIPKIQKPEKPVTGNENTKVLANVFLGTRDKCVCCNKTVYPTERVTVNGTPYHKGCFKCTYGGCTVSSSNFITHEGKPYCKHHHIQLFKEKGNYSQLENEC

SEQ ID NO: 31827 - protein, 74 aa, Glycine max
  Clone ID: TF_LIB3049-029-Q1-E1-G6.pep
RSPIQNNHSLNIRSKMSAAEEAKVPAVEKPVEEVKAPKLAKEKKPKAPKEKKPKQAKTASHPPYLQVISRKFLS

SEQ ID NO: 31828 - protein, 298 aa, Glycine max
  Clone ID: TF_GmC6822_1.pep
MGAPKQKWTAEEEAALKAGVVKHGAGKWRTILTDPEFSSILRMRSNVDLKDKWRNINVTAIWGSRQKAKLALKKNLLPSTKIDNNHLALSTVVQRDKEVANPKPLAVSSGTSPNSKEKISKLQNFQLDNLILESIIKLKEPRGSDQAAIAAYIEDQYCSTPTLRKLLSTKLKHMVASGKLMKVKHKYRIATNLTISEKRRCSSLLLLEGRPKDSPKAEKTGVNILSKSEIDAELSKMKGVTPQEAAAAAAKAVAEAEAAIAEAEAAAREADAAEAEAEAARVFAKAAMKALKCKTLRI

SEQ ID NO: 31829 - protein, 66 aa, Glycine max
  unsure (1)..(66): unsure at all Xaa locations
  Clone ID: TF_LIB3055-003-Q1-N1-D4.pep
SRRPFYHPTLTGCNGALAILKERTGSSHYAITNFIXGRPKELPPTYKKLVLVHLKKSVVAGKLVKV

SEQ ID NO: 31830 - protein, 106 aa, Glycine max
  unsure (1)..(106): unsure at all Xaa locations
  Clone ID: TF_LIB3167-016-P1-K1-F5.pep
KTGATHASALSEFLSISCFNFNNGYSFCGVSFNHAVVXSTASQPKAKKTASSKKPLSHPPFAVMIAHAIASLKERTVSSQYSNTKYIEGXHNELPATYKNLVLVHL

SEQ ID NO: 31831 - protein, 105 aa, Glycine max
  Clone ID: TF_jC-gmst02400046d07a1.pep
PSDTWPQKSPLAGRDPIPSLTESILPRTRRRRPNLEAKAKKTKEPKPNKALRPGHPPTQPIYEKIVKDANTSLKEKTGASQYTIAKFIQGKHMHDTPDLMKQKLY

SEQ ID NO: 31832 - protein, 255 aa, Glycine max
  unsure (1)..(255): unsure at all Xaa locations
  Clone ID: TF_GmC13_1.pep
MGNQKQKWTQDEEDALIAGVEKHGPGKWKNILKDPQFAPFLTSRSNIDLKDKWRNLSVSNGAQGSKEKSRVPKLKALPAPPAPTATPQNAAPALQNAASDVTPPDASQNDQDAKNPPRYNAMIFEALSALKDSNGSDMNAIIKFMEQKXLQVNQNFRRALSTKLRRLVSQGKLEKVQNGYKVKKEASSGTKSPSPKPKDVRPPQPQQQSPASVLMTNDTIKEAADTAAYRVADAESKSYLAAEAVKEAEKNIIAG

SEQ ID NO: 31833 - protein, 97 aa, Glycine max
  Clone ID: TF_uC-gmflminsoy035f03b1.pep
MATEEPTGAGEPAPEPATAEPPPEEKEETKPEAKAKKTKEPKPKKGARPRNPPTHPNYEETGKEATTSLKEKTGSSQHANAKNTEEKHTQRPPNRKK

SEQ ID NO: 31834 - protein, 133 aa, Glycine max
  Clone ID: TF_LIB3108-006-Q1-K1-H9.pep
EAIASLKERTGSSQYAISKLMEDKHKAHLPANFKKLLLVQLRKLTAAGKLTKVKNSYKISAKPATAVKPKSAAAAPKAKPKSATAAAKAKLKPKSAAAKLKKAAVKPKRKSSAVKPKSKAAVVKSKAVAPKPK

SEQ ID NO: 31835 - protein, 176 aa, Glycine max
  Clone ID: TF_GmC1613_7.pep
MATEEVNKLQSLPPYPEMIVKALEALNEADGSSKSAISKYIETTYGELPDETVLGSHLNKMKESGELAFKQNNYMKADPNAPPKRGRGRPPKPKVPLPPGTVVSPPRPRGRPPKDPNAPPKSPKAKATPATGRPRGRPKKVARSPAVPSPTAVSTGRPRGRPPKVKPQLTEVSVES

SEQ ID NO: 31836 - protein, 197 aa, Glycine max
  Clone ID: TF_GmC101_2.pep
MSAAAEEANAPAVEKPVEEVKAPNPAKEKKPKAPKEKKPKQAKTASHPPYFQMIKEALIALNEKGGSSPYAIAKYMEEKHKAVLPANFKKILGLQLKNQAARGKLVKIKASYKLTEAAKKENTAKVTKANAEKKESRPKRSKTATAAAPKKTEAVKRAAKKVGPKKTKKVSTPAKPKQPKSIRSPTKRARKAAVAAA

SEQ ID NO: 31837 - protein, 192 aa, Glycine max
  Clone ID: TF_GmC101_1.pep
MSAAEEAKVPAVEKPVEEVKAPKLAKEKKPKAPKEKKPKQAKTASHPPYLQMIKDALIALNEKGGSSPYAIAKYMEEKHKAVLPANFKKILGLQLKNQAARGKLVKIKASYKLAEAAKKVKESTAKATKESRPKRNKIATAVAPKKTEAVKKPAKKVGPKKTKKVSTPAKPKQPRSIRSPTKRARKAAVAAA

SEQ ID NO: 31838 - protein, 158 aa, Glycine max
  unsure (1)..(158): unsure at all Xaa locations
  Clone ID: TF_LIB4165-011-R1-K1-A4.pep
TPSQXTPXPXXXPGRPTRPGKHKELPATYKKLVLVHLKKSVAAGKLVKVKNSFKLAPTKPAPVKAAAPKKPTKAATKPASKPKAATPKKKAVAKPKAKAAATTAKPKSKPAKVAAKKVAAKPAKKKTPVKAVKKPKSVVKKPKSVKSPAKKTKAKAKK

SEQ ID NO: 31839 - protein, 224 aa, Glycine max
  Clone ID: TF_GmC796_5.pep
MGAPKQKWTAEEEQALKAGVVKHGVGKWRTILKDPEFSGVLYLRSNVDLKDNWRNLSVMANGWSSREKSRLSVRRVHQVPRQDENSMAITPVVPSDEEIVDVKPLQVSRDIVHIPGPKRSNLSLDKLIMEAITSLKENGGSNKTAIAAFIEDQYWALPGLKSMLSAKLKFLTASGKLIKVNRKYRIAPIAAYSDRRRNSSVLYLEGRQKASMKIDRDETNILTR

SEQ ID NO: 31840 - protein, 383 aa, Glycine max
  Clone ID: TF_GmC137_2.pep
MAISFSPKHPPYDEMIYTAIGALKERDGSSKRAIGKYIEQVYKDLPPTHPALLTHHLNRLKSSALLVLVKKSYKLPGSHHLPALQPQKTRGRPPKPKPHPVWPAAALTDSPALLSAKRGPGRPKKIGVSPPGPRGRPPGTGRSKLPKRPGRPPKPKSVSAISSGLKRRPGRPPKAQSNVNVIPFAAPVAPGLPTVQPILPTASVPNGSPRPRGRPKKSFTAAGAPALSAVAGAARGRGRGRPRGVFPVVRPGRPQKLAVGRSKNPVRRPVGRPKGSTAAAITAHKAANEDLRKKLEHFQSKVKESLGTLKPYFNHESPVTAIAAIQELEVLSTLDLKAPLRDETQQQPPPLPQTQTQVYEQQYPQPQSQQLPQFFQPHTSAPS

SEQ ID NO: 31841 - protein, 216 aa, Glycine max
  Clone ID: TF_GmC1479_1.pep
CICTKIYYFVDLFFCFCQSGRNSAEKMSKANAKNKSPSTELHPPYFEMIADAISSLKDRTGSSQPAIAKFIEDKHSKVLPPNFRKLLSVQLKKLVKSEKLYKVKNSYKLSSATDKETQKNTETEPKQKVEKKKKKKKKVGEKIKRLSQVKTPETLKKKAPTKKDAAATKKKSASAVEGSGGGKVKCLSQVKTPEALKKKKPNLTPKPSRPNRNARK

SEQ ID NO: 31842 - protein, 493 aa, Glycine max
  Clone ID: TF_GmC206_1.pep
MEPSSISPPPAPPATAVPFPAEPNDHLPPPIPEPPSNHPPYAEMIYTAIEALKEKDGSSKRAIAKYIEQVYTQLPPNHSDLLTQHLNHLKSRGLLQMVKKSYALPRSVPVSVPGPAPTQGTSAVPAAVVAITTTPRPRGRPRKAQNPVQNSPLRSGPKRGRPPTKSILRARIAKRGQSSRHRGKKPGRPPTATTTDVSASAGPKRRPGRPPKNQSQPTLIPFAPAVSAASVDTEHVAASAETAPVDADAALGPRARGRPKKYADEMIAAGRGRGRGRGRGGGGRGRGRGRGELPAQPRKPGARPVGRPKKGSTSASTSQNAANEDLRRKLEHFQSKVKESLAVLKPHFNHESPVTAIAAIQELEVLGTMDLNVPLRDETLPHQVELPPPQPPVQQQQQPPQQQLQQPPQQPPQATPSTTTTAATATDISANISSISSAAVPPSPAFAAVPATAAAAATATATAIPAPGTASFPPTVSSLGIRPRLGRITWSSI

SEQ ID NO: 31843 - protein, 200 aa, Glycine max
  unsure (1)..(200): unsure at all Xaa locations
  Clone ID: TF_LIB4167-040-R1-K1-G8.pep
TRPPTSIPPPPGXTVPFTVEPSNHVTPADNTNTNHPPYDEMIYTAIGALKEKDGSSKRAIGKYMEQVYKDLPPTHSALLTHHLNRLKSAGLLILVKKSYKLQAQKPRGRPPKLKSQPNTELTWPALALNDNPALQSAKRGPGRPKKIAGPVGVSPGPMVPGRRGRPPGTGRSKLPKRPGRPPKPXSXVSPISSGLKRRSG

SEQ ID NO: 31844 - protein, 164 aa, Glycine max
  Clone ID: TF_GmC333_7.pep
MIAEAIASLKERTGSSQYAITKFIEGKHKELPPTYKKLVLVHLKKSVAAGKLVKVKNSFKLAPTKSAPVKAAAAPKKPTKAAAKPAAKPASKPKAAAPKKKAVAKPKAKAAATKPKAKPAKAAPKKVAAKPAKKTPVKAVKKPKSVVKKPKSVKSPAKKAKAKK

SEQ ID NO: 31845 - protein, 169 aa, Glycine max
  unsure (1)..(169): unsure at all Xaa locations
  Clone ID: TF_LIB4391-008-R1-K1-F5.pep
MSTAAQPKAKKTASSKKPLSHPTFAAVLPNYSLSIQFRNQLCLISFIVLXMIAEAIASLKERTGSSQYAITKFIEGKHKELPPTYKKLVLVHLKKSVAAGKLVKVKNSFKLAPTKSAPVKAAAAPKKPTKAAAKPAAKPASKPKAAAPKKKAXAKPKAKAAATKPKAKP

SEQ ID NO: 31846 - protein, 184 aa, Glycine max
  Clone ID: TF_GmC772_1.pep
MATGQVINKPPSLPPYPEMIREAIEALNEENGSNKSSISKYIESTYGGLPQAHKVLLNVHLAKMRESGVLVFWKNNYTKRDPNAPPRRGRGRPPKPKEPLPPGTVLSPPRPRGRPSKDPNDLQKPLKASVVGSGRPRGRPRKMAWPTGGLGEVSQASKAKPVTSNGRPRGRPPKVKAVFTEISV

SEQ ID NO: 31847 - protein, 302 aa, Glycine max
  Clone ID: TF_GmC1641_3.pep
MASEEPTVAVEPAPEPATAEPPPEEKEEPKPEAKAKKTKEPKPKKVSRPRNPPTHPSYEEMIKDAITSLKEKTGSSQHAIAKFIEEKHKQLPPNFRKLLLYHLKKLVAAGKLVKVKGSFKLPPTRPSASSSSSPAKKKKPAPAKPQPKPKPKPKPKPAAKAKDTKATKSKAPAKPKAAAKPKAKVPAKPKPAPKPKAAAAAASKPKPAAAKPKGTKPAAKPKPKPAAKTKAAAAKPAAKPKAKPAKASRTSTRTSPGKKAAPAAKPAAKKVAPAKKAPVKSVKPKSVKSPAKKATAKRGGRK

SEQ ID NO: 31848 - protein, 525 aa, Glycine max
  Clone ID: TF_GmC206_2.pep
RSGFPGPSRVRVNPIQFPIFESTLYLSTMEPSSISPPPAPPATAVPFPAEPNDHLLPPISEPPSNHPPYAEMIYTAIEALKEKEGSSKRAIAKYIEQVYKEHLPPNHSILLTQHLTLLKSSGMLQMVKKSYALPRSVPLTGAAPAQAHDAATSALQLTSPRPRGRPRKAQIPVQNLPQDINVQVQQNAEPVWAALGLADEPVQTEGSSKKRGRPKKSVTPGAGPAKRGRPPGSGKRLGRPPKEKSVTATTTTDVSGPKRRPGRPPKNQSQPTPIPFAPADAAAAVGTEYVPRAETVPVDAAAALGPRARGRPKKYADEMVAAGRGRGRGRGRGGGGGRGRGRGRGQLPAQLRKSGARPVGRPKKGSTSASTSQNAANEDLRRKLEHFQSKVKESLAVLKPHFNHESPVTAIAAIQELEVLGTMDLNAPLRDETLPSQEEQPPLQQQQQPPQQQFPPPQQQPPQQHLAPQQLPPQPQAPIFQQTYPPFHLPQFHHHQPTLQFQQQPQPPQLFQHQAQPPSHQQFHP

SEQ ID NO: 31849 - protein, 271 aa, Glycine max
  Clone ID: TF_GmC796_2.pep
MGAPKQKWTAEEEQALKAGVVKHGVGKWRTILKDPEFSSVLYLRSNVDLKDKWRNLSVMANGWSSREKSRLSVRRVHQVPRQDENSMAITAVAPSDEEIVDVKPLQVSRDMVHIPGPKRSNLSLDKLIMEAITCLKENGGSNKTAIAAFIEVNRKYRIAPIAAYSDRRRNSSVLYLEGRQKASMKIDRDETNILTRSQIDLELEKIRSMTPQEAAAFAARAVAEAEAAIAEAEEAAKEAEAAEADAEAAQAFADATTKSAKGRKSPKRIHA

SEQ ID NO: 31850 - protein, 164 aa, Glycine max
  Clone ID: TF_GmC333_5.pep
MIAEAIASLKERTGSSQYAITKYIEGKHKELPATYKKLVLVHLKKSVAAGKLVKVKNSFKLAPTKPAPVKAAAPKKPTKAATKPASKPKAATPKKKAVAKPKAKAAATTAKPKSKPAKVAAKKVAAKPAKKKTPVKAVKKPKSVVKKPKSVKSPAKKTKAKAKK

SEQ ID NO: 31851 - protein, 297 aa, Glycine max
  Clone ID: TF_GmC1641_1.pep
MATEEPTVAVEPAPEPASADPPPEEKEETKPEAKAKKTKEPKPKKVSRPRNPPTHPSYEEMVKDAITSLKEKTGSSQYAIAKFIEEKHKQLPPNFKKLLLYHLKKLVAAGKLVKVKGSFKLPPTRPAASSSSSSSPAKKKKPAAAKSKPKPKPKPAAKAKDTKATKSKAPAKPKPAAKPKAKAPAKAKPAAKPKAAAAAKPKPAAAKPKAAKPAAKPKPAAKTKAVPAKPAAKPKAKPVKASRTSTRTSPGKKAAPAAKPAAKKVAVAAKKTPVKSVKPKSVKSPAKKATAKRGGRK

SEQ ID NO: 31852 - protein, 96 aa, Glycine max
  Clone ID: TF_LIB3108-022-Q1-K1-E10.pep
PSAKAPKKTSAPKKPAAHPPYIEMISEAISTLKERGGSSQYAISKFIEDKHKAHLTGNFKKLLLVQLRKSTAAGKLTKVKNSYKVAVKPAAAKKPT

SEQ ID NO: 31853 - protein, 60 aa, Glycine max
  Clone ID: TF_uC-gmroLIB3259P207c02b1.pep
MDPTSIPLSTATNIPFTVQPSNHVTLVYNSNTNTNHPPYDEMMYTAIGAIKEKDGSSKRA

SEQ ID NO: 31854 - protein, 176 aa, Glycine max
  Clone ID: TF_GmC1613_5.pep
MATEEVNKPQSLPPYPEMIVKALEALNEADGSNKSAISKYIETTYGELPDETVLGSHLNKMKESGELAFKQNNYMKADPNAPPKRGRGRPPKPKVPLPPGTVVSPPRPRGRPPKDPNAPPKSPKAKATPATGRPRGRPKKVARSPAVPSPTAVSTGRPRGRPPKVKPQLTEVSVES

SEQ ID NO: 31855 - protein, 176 aa, Glycine max
  Clone ID: TF_GmC1613_6.pep
MATEEVNKPQSLPPYPEMIVKALEALNEPNGSNKSAISKYIETTYGELPDATVLGSHLNKMKDSGELSFKQNNYMKADPNAPPKRGRGRPPKPKAPLPPGTVVSPPRPRGRPPKDPNAPPKSPKAKATPGSGRPRGRPKKVPRSPAVAAPTAVSSGRPRGRPPKVKPQLTEVSVES

SEQ ID NO: 31856 - protein, 176 aa, Glycine max
  Clone ID: TF_GmC1613_8.pep
MATEEVNKPQSLPPYPEMIVKALEALNEPNGSNKSAISKYIETTYGELPDATVLGSHLNKMKDSGELSFKQNNYMKADPNAPPKRGRGRPPKPKTPLPPGTVVSPPRPRGRPPKDPNAPPKSPKAKATPGSGRPRGRPKKVPRSPAVAAPTAVSSGRPRGRPPKVKPQLTEVSVES

SEQ ID NO: 31857 - protein, 86 aa, Glycine max
  Clone ID: TF_GmC333_1.pep
MVLQNDIDLLNPPVELEKRKHKLKRLVQSPNSFFMDVKCQGCFNITTVFSHSQTVVVCGNCQTVLCQPTGGRARLTEGCSFRKKGD

SEQ ID NO: 31858 - protein, 179 aa, Glycine max
  Clone ID: TF_GmC333_10.pep
MSTASQPKAKKTASSKKPLSHPPFAVMIAEAIASLKERTGSSQYAITKYIEGKHKELPATYKKLVLVHLKKSVAAGKLVKVKNSFKLAPTKSAPVKAAAAPKKPASKPKAAAPKKKAVAKPKAKAAATKPKAKPAKAAPKKVGAKPAKKTPVKAVKKPKSVVKKPKSVKSPAKKAKAKK

SEQ ID NO: 31859 - protein, 190 aa, Glycine max
  Clone ID: TF_GmC333_6.pep
MSTASQPKAKKTASSKKPLSHPPFAVMIAEAIASLKERTGSSQYAITKYIEGKHKELPATYKKLVLVHLKKSVAAGKLVKVKNSFKLAPTKPAPVKAAAPKKPTKAATKPASKPKAATPKKKAVAKPKAKAAATTAKPKSKPAKVAAKKVAAKPAKKKTPVKAVKKPKSVVKKPKSVKSPAKKTKAKAKK

SEQ ID NO: 31860 - protein, 411 aa, Glycine max
  unsure (1)..(411): unsure at all Xaa locations
  Clone ID: TF_GmC137_1.pep
MDPTSIPPPPATTVPFTVEPSNHVTPADNTNTNHPPYDEMIYTAIGALKEKDGSSKRAIGKYMEQVYKDLPPTHSALLTHHLNRLKSAGLLILVKKSYKLPGSDPLPVLQAQKPRGRPPKLKSQPNTELTWPALALNDNPALQSAKRGPGRPKKIAGPVGVSPGPMVPGRRGRPPGTGRSKLPKRPGRPPKPKSVSAISSGLKRRPGRPPKAESNVNVIPFAAPVAPGLPTVQPIVPTASVPNGSPRPRGRPKKIVAGAGAPALSSVGGAPRGRGRPRGVLPLVRPGRPQKLAVGRPKNPARRPVAPQGIDAITAHKAANDDLRXRKLEHFQSKVKESLGTLKPYFNHESPVTAIAAIQELEVLSTLDLKAPLRDETHQQPQPQTQVYEQQYPQPQSLQQQFFQPHTSAPS

SEQ ID NO: 31861 - protein, 103 aa, Glycine max
  unsure (1)..(103): unsure at all Xaa locations
  Clone ID: TF_GmC875_3.pep
MTVDEVDSSSEWSREQDKAFENALATHPEDDSDRWEKIAADVPGKTIEEIKQHYEXLLVEDINQIESXCVPLPSYNSSSEGXNSXCXDEGAGQKRQRPGHYSG

SEQ ID NO: 31862 - protein, 112 aa, Glycine max
  Clone ID: TF_LIB3170-061-Q1-K2-G10.pep
MAPTRKSRSVNKRMSSSNDNSPEKDGVNSNKSKQRKKKLTDKLGSQWSKEELERFYEAYKKYGKDWKKVAACVRNRSTEMVEALYSMNRAYLSLPEGTASVVGLIAMMTDHY

SEQ ID NO: 31863 - protein, 386 aa, Glycine max
  unsure (1)..(386): unsure at all Xaa locations
  Clone ID: TF_GmC5883_1.pep
MDAKDILGLPKNSFPSLEKKSRPPKESQRKPDGISREVYALTGGLASLMPAIEASQLKKKPLPLEKITWQWLPFTSSARKDNLHLYHWVRVINGVPPTGDYSFAKYNKSVDVIKYTDEEYDKYLSDPTWTKEETDQLFDLCERFDLRFIVIADRFPSSRTVEELKDRYYSVSRAILIARAPSSGDVVAHSIVKETYNVAQEMERKRALSMVLSRXATERAVPGETISPSNVQIPMAVPDNASTLATLRMLRLYLKIYALEQMVQAANASAGLRTIKRVEQTLQDLGVNLKPRVPTKAVCAEHLELRKEILTLXLNLQKQVQYKEAEGSSFRDGSYGETPGTPKDRTFVPDSTNFGVERVGKKDQKRKAPGAPSAHKRPRKLKASDL

SEQ ID NO: 31864 - protein, 246 aa, Glycine max
  unsure (1)..(246): unsure at all Xaa locations
  Clone ID: TF_GmC600_1.pep
QQILFPTLGRKKMVQQEIRRGPWTEQEDYKLVYFVNMFGDRRWDFIAKVSGLNRTGKSCRLRWVNYLHPDLKRGKLTPQEEHLVMDLXVKMSYWRTHMSKKNANEKKHASAASPVSSXCCQSSLSSNNHSCYDTGGYDDGMMMGLIGGEKGYSMDDIWKDIMSEEENNIYNNNLQPVYEGHSEEGCNFSCPPPPMIMPSPPSWDQYNISSQPLWVMDEEESNKMLFPTLSDQYFPYYEQGNAFLTG

SEQ ID NO: 31865 - protein, 433 aa, Glycine max
  unsure (1)..(433): unsure at all Xaa locations
  Clone ID: TF_GmC5883_2.pep
MDAKDILGLPKNSFPTLEKKSRPPKESQRKPDGISREVYALTGGLAPLMPATEASQLKKKPPPLEKITWQWLPFTSSARKDNLHLYHWVRVVNGVPPTGDYSFAKXNKSVDVIKYTDEEYDKYLTDPMWTKEETDQLFDLCERFDLRFIVIADRFPSSRTVEELKDRYYSVSRAILIARAPSSGDVVAHSIVKETYNFAQEMERKRALSMVLSQTRQQERRDEEVLVEAKXIAEKRLPPKVAGQSQFVASNAGAEAIERAVPGETVSPSNVQLPMVAPDNASTLASLRMLRVYLRTYALEQMVQAGNASAGLRTIKRVEQTLQDLGVNLKPMVPTKAVCAEHLELRKEILTPTRPQKQVQYKEAEGSSFRDGSYGETPGTPKHLHRGGDQDRTFIPDSMNFGVERVGKKDQKRKAPGAPSAHKRPRKLKASDL

SEQ ID NO: 31866 - protein, 141 aa, Glycine max
  unsure (1)..(141): unsure at all Xaa locations
  Clone ID: TF_uC-gmroLIB3258087c12a1.pep
LVCITLLSINRIEIYGKSCRLRWVKHLRPDFKRGHITPQEESIGLELHARWGNRXDLFSHSLEPACFHIMAAYIFQGLDCXTINFRWSAIARSLPGRTGNEIMIYWRTHFKEKAKSPYDAAEKARNRLMRKQQFHQPLLRQ

SEQ ID NO: 31867 - protein, 311 aa, Glycine max
  Clone ID: TF_GmC54235_1.pep
MEVAKDPNSQADSDSELELYTIPSSSRWFAWEEIHETERAAFKEYFDGSSISRSPKIYKEYRDFIINKYREEPSRRLTFSEVRKSLVGDVTFLHKVFLFLEHWALINYGTAEDVEEDHCKVRFEEGAPSGIRVAATPNSLKPMLLPRNGKSAANATGASLKLPPLASYSDVYGDLIRQKEGNCALCAHKCGSGHYRCTQDNFIICTNCFKSGNYGEKRSTEDFVLSESSENSGKHDTVWTEAETLLLLESVLKHGDDWELVAQSVQTKTKLDCISNLIELPIGELMLGPAHRNVNINDANGIVNNAKQSQS

SEQ ID NO: 31868 - protein, 385 aa, Glycine max
  Clone ID: TF_GmC794_2.pep
TAARRRQKGNYLRPDLKRGTFSQEEENLIIELHAVLGNRWSQIAAQLPGRTDNEIKNLWNSCLKKKLRQKGIDPVTHKPLSEVENGEKAAEVSNELNLLKSESSKSDSASYEQRTSISPKAYAPEMDGSCSSKIEINFVTNNNCYNKDLFLDRFMSSSRQESYTTSCQPSDLMGNFPIQMSYATNDQCLPNDSNSSHWFSQTGRSFDMNTEFPFNAAVTSINPTPTTNLFLPNNSFCYKPSLAVPSDNVSIPYGSHYWEASASNNSNSSTELRSSSPLNIFSSWGLADCGTSTTKEAQIHMMENHNTEEAKWDEYLHNPISMLASSVQNQAPESLCNDIKTSMHLVPDTLGAMLPHNHTKQQEQSQTSSFFSKDIQKLRAAFGHM

SEQ ID NO: 31869 - protein, 122 aa, Glycine max
  Clone ID: TF_GmC27273_1.pep
MEVEVPISLDLNNQLQPETVVSVQNGDPGVSSSVANAVNPQQPATKKPTRQWAAWTRQEEESFFTALRQVGKNFEKITSRVQSKNKDQVRHYYYRLVRRMNKLLGPGLCLDAKNSKDTNAAM

SEQ ID NO: 31870 - protein, 100 aa, Glycine max
  Clone ID: TF_GmC189152_1.pep
MASSSLSKQKASDSSWTPKQNKLFEKALAKYDKDTPERWQNVAKAVGGKSADEVKRHYEILLEDLRHIESGRVPLPKYKSTGSSTNVDEEERLLKYLKLN

SEQ ID NO: 31871 - protein, 93 aa, Glycine max
  Clone ID: TF_LIB5118-031-A1-PF1-A7.pep
MASSSMSATGSWSAKDNKAFERALAVYDKDTPDRWKDVARAVGGKTPDEVKSHYELLLRDISQIESGKVPYPNYKKSAEHDEEEKRMRNLKIQ

SEQ ID NO: 31872 - protein, 101 aa, Glycine max
  Clone ID: TF_LIB3242-689-P1-J1-D10.pep
MSTSKSVSGSSEADNQLGRGPWTVGDDHLLYQYIVKDGGGRSIMLSKHTRLKRTGTSSRSWRLNFLMPAMKRSNLTPQEQLIILELHSKLGNRFLSWALHS

SEQ ID NO: 31873 - protein, 247 aa, Glycine max
  unsure (1)..(247): unsure at all Xaa locations
  Clone ID: TF_GmC2603_1.pep
YSLLFRKKKMVQQEVRKGPWTEQEDFKLVSFVGLFGDRRXWDFIAKVSDLNRTGKSCRLRXWVNYLHPGLKRGKMTPQEERLVLELHSKWGNRWSRXARKLPGRTDNEIKNYWRTLMRKKAQDKKRGEAASSSSLRTGEESFYDTGGHGVTASTQDQGQKGEQGLFSMDDIWKDIDNMSEENNTLQPVYEGNSEEGCNFSCPPQVPSPSSWEYSSDPLWVMDEESLFCPLSEPYFSCYAQGSVFLTG

SEQ ID NO: 31874 - protein, 91 aa, Glycine max
  Clone ID: TF_GmC1001_1.pep
MASSQGWTPKQNKRFENALAIFDKDTPDRWHTVARAVGGKTVEEVKRHYEKLVEDVKKIEEGHVPLPNYRSAARGYGYMDEETRMKALSLQ

SEQ ID NO: 31875 - protein, 59 aa, Glycine max
  Clone ID: TF_LIB3242-279-Q1-J1-C3.pep
MIIRGSTILINLINFRWSKIAKHLPGRTDNEIKNFWRTRIQKHIKQAETSQQHGKFIRE

SEQ ID NO: 31876 - protein, 223 aa, Glycine max
  Clone ID: TF_GmC95896_1.pep
IIASQLPGRTDNDIKNYWNTKLKKKMMGVKMNPSALKKPHQVNLSSMLQNSTPSSPFTSLSFKNNHNNSYYYQPHLPFTGSESMTYSSLLSDNYSTFESLQNYQVSSVFMETSCSSSSDGSCNNNQINHVKEAELGYVGDGTFGDQIIGRLSYLNSGVEDQDTLKLVPSNAGRVSGVTDEETRLWGESPLEYGLEEIKQLISNSSCNNFMLDDSKTGEMVMYY

SEQ ID NO: 31877 - protein, 88 aa, Glycine max
  Clone ID: TF_LIB5118-020-A1-PF1-E1.pep
MDSDQGKLFIGGISWDTTEDKLKEHFGNYDDVLSTSVMREKNTGKPRGFGFVVFADPNILDRVMEDKHVIDGRTQVVWGGNLAVTNLG

SEQ ID NO: 31878 - protein, 42 aa, Glycine max
  Clone ID: TF_5263160.pep
INYLRPDVKRGNFTPEEEETIIRLHKALGNKWSKIASGLPGR

SEQ ID NO: 31879 - protein, 100 aa, Glycine max
  Clone ID: TF_GmC1227_3.pep
CYKTNSRAPKPQIETMTSKNNNDNLNNLSRERSSPDTCRRTHFPAIANRIEFRSETEKEENKRKSKNREVESIRRRREVLLKRNQKPNQKLLHTHSPESV

SEQ ID NO: 31880 - protein, 92 aa, Glycine max
  Clone ID: TF_GmC40008_1.pep
MASSSMSSTGSWSAKDNKAFERALAVYDKDTPDRWYNVAKAVGGGKTPEEVKRHYELLLRDVRHIESGQVPFPYKQNGGSQEEKRLRNMKLQ

SEQ ID NO: 31881 - protein, 145 aa, Glycine max
  Clone ID: TF_GmC119893_2.pep
EALEFHITEKRAKVHLELGAAFYDWNFDQVGEDVKLLWTEEEEKKFEDAIRSNPPSPETYFWDHIFRAFPTKSRADLVSYYFNVFILERRGYQNRHTPDDINSDDDDDEAGPLRNVFGHQTPNSGYQAPNPRGSILLTPKKSQTK

SEQ ID NO: 31882 - protein, 295 aa, Glycine max
  unsure (1)..(295): unsure at all Xaa locations
  Clone ID: TF_GmC1476_1.pep
MGAPKQKWTAEEEAALKAGVLKHGAGKWRTILTDPEFSAILHMRSNVDLKDKWRNINVTAIWGSRQKAKLALKRNLPAPKIDNNHMALSXLVRHDEFXDTKPIAVSGGPLQSPNLKEQISRLVDNHILEAIVNMKEQKGSDKVAIASFIELLXIEEKYRFPPNLSKLLPAKLKHMVASGKIIKEKHKYRIAPSSTVXTSEVLLQEKPKETAEVHKNDDVSMILKSQFYAEISKVKGLTAQEAAAAAAKAVAEAEAAIAQAEAAAREAEAAEAEAEAAQVFAKAAMKALKCKMLHI

SEQ ID NO: 31883 - protein, 54 aa, Glycine max
  Clone ID: TF_LIB3242-435-P1-K1-C6.pep
MRKPSCDIKKLNKGAWSKQEDQKLVDYIKKHGEVCWRTLPQAVRIYEFFFINKY

SEQ ID NO: 31884 - protein, 34 aa, Glycine max
  Clone ID: TF_jC-gmro02910037f03a1.pep
PPPFVVRPNRTGESCRLRWVNYLHPGLKRGKMTP

SEQ ID NO: 31885 - protein, 146 aa, Glycine max
  unsure (1)..(146): unsure at all Xaa locations
  Clone ID: TF_jC-gmXLIB3563P034be05a2.pep
MGTLSVCCLCYLYFVHVLCVCCCSTEQSFAYRLMGLSPCCDLIGLMIGPWTAAEDEILSTYLMNNGGHGSWRPLPRMAGLVRSGSSRRLRWSXYLTPALTVVPLLLQEXILCIQLHGLLGNAWAAVASHLPGRSDGEIXDLWNILL

SEQ ID NO: 31886 - protein, 63 aa, Glycine max
  Clone ID: TF_GmC739326_1.pep
VVSMASSSAWTTKQNKKFENALAIYDRDTPDRWQNLARAVGGKTVEEVKRHYEMLVDDLKRTR

SEQ ID NO: 31887 - protein, 123 aa, Glycine max
  Clone ID: TF_LIB3242-144-Q1-J1-B10.pep
MAPSRKSRSVNKRFSTVREAASSKDKITENASKNRLKKRKLADMLGPQWNKEELEHFYEAYRKYGKDWKKVALAVHNRSVEMVEALYTMNRAYLSLPEGTASVVGLIAMMTDHYSVLGGSDSG

SEQ ID NO: 31888 - protein, 87 aa, Glycine max
  Clone ID: TF_LIB3242-142-Q1-J1-C2.pep
MGAPKQKWTAEEEAALKAGVVKHGAGKWRTILTDPEFSSILRMRSNVDLKDKWRNINVTAIWGSRQKAKLALKKNLLPSPKIDHNHM

SEQ ID NO: 31889 - protein, 59 aa, Glycine max
  Clone ID: TF_LIB3242-179-Q1-J1-B9.pep
YIELLSYSFPARWSSIAKHLPKRTDNEIKNYWNSYLRKQFEKNAGDSSSPKPIISDSFP

SEQ ID NO: 31890 - protein, 92 aa, Glycine max
  Clone ID: TF_LIB3028-053-Q1-B1-G10.pep
VHEWKRIHEEESLQRWTLSDGHATHKKEKLYVYEIESRGPRNWSLIIRSIPGRSGNSCRLYWCTQLSPSGSRTRPSTTNPTTPLSRPHAPFG

SEQ ID NO: 31891 - protein, 74 aa, Glycine max
  Clone ID: TF_GmC126456_1.pep
MFLMKFVKCVNGCRWAAIASYLPQRTDNDIKNYWNTHLKKKLKKMQSGGDDDDNNGDKLNSCYSQNKGQWERRL

SEQ ID NO: 31892 - protein, 103 aa, Glycine max
  Clone ID: TF_LIB3242-051-Q1-J1-E9.pep
MASCSISASGSWSVKDNKAFEKALAVYDKDTPDRWYNVAHAVGGKTPEEVKKHYELLVQDVKHIESGRVPFPNYKITTSESTDQEEKRLRNWNWNLHDPPTPI

SEQ ID NO: 31893 - protein, 97 aa, Glycine max
  Clone ID: TF_GmC4605_1.pep
MASSSISASGSWSVKDNKAFEKALAVYDKDTPDRWYNVAHAVGGKTPEEVKRHYELLVQDVKHIESGRVPFPNYKKTTSGSTDQEEKRLRNLNLNLQ

SEQ ID NO: 31894 - protein, 506 aa, Glycine max
  Clone ID: TF_GmC21781_1.pep
KTTVISLLRFVTLFWRFWPFSVSNIRTNFSLSLFNSTLGGHEMDREEYLGKCSNMKCQRVQVDESYVHALQDEVMEVEHLLAEPRNDHASLDGSLDSHTTLNDKDDLELEVLDGLLDDVEIDDLEGTGGFAGACEEYFLDFGFADKFEEVLGSGPFEGSLLQISSSESHSSGLSGSSIVGGVLESTKVPIAKSECKNDSLDETITYEAHGAFRNNPSQPSKVNCRYNISLDIQHLQELENNRHLAAGILTCKKEKGPVEKGQPAVPREKRFRKPTQRYIEEFSNSRSKEKAPTAVTKTEYLSDSSCDVLHIRIKALKKSPSEKSSNENRDVMLPELQVHKGRPKKEKLEYDIESFPLESEDEWLTSKRSRRKDRRKHQKMWTLPEVLKLVEGISEYGVGRWTDIKRFLFSSTSYRTPIDLRDKWRNLLRASSAQKSTREAEQNDELALRPLPFNVVHRVQELAKIHPYPRERGSKRLRVSQAGSSVIAKDSPPLSLSKRNVRRKFT

SEQ ID NO: 31895 - protein, 239 aa, Glycine max
  Clone ID: TF_GmC341_1.pep
MDVKKGGSVVQAQVKLQKHNEKEMGMRKGPWAVEEDTILVNYIATHGEGHWNSVARYLSITGLRRSGKSCRLRWLNYLRPDVRRGNITLQEQILILDLHSRWGNRWSKIAQQLPGRTDNEIKNYWRTRVIKQAKQLKCDVNSKQFRDTLRYVWMPRLLERLQPTSQALEPNQSGLVLHASSSLLPSNSDHSIERGSDLWPGFNNQMLLEQGSGGDLLESLWDDDNMCFLQQLSYDLQMK

SEQ ID NO: 31896 - protein, 63 aa, Glycine max
  Clone ID: TF_LIB3242-739-P1-K1-D2.pep
MDDKKGGCAVQAQVKLQNHNEKEMGMRKGPWAVEEDTILVNYIATHGEGHWNFVARCAGMHAS

SEQ ID NO: 31897 - protein, 109 aa, Glycine max
  Clone ID: TF_GmC1498_1.pep
EARNRARQSLHPSLLVCIISGSSEGKDRSMSTTATTTSEEVSSNEWKVIHMSEQEEDLIRRMYKLVGDKWNLIAGRIPGRKAEEIERFWIMRHGDAFSVKRNGSKTQDS

SEQ ID NO: 31898 - protein, 85 aa, Glycine max
  Clone ID: TF_uC-gmflLIB3275P088h01b1.pep
RGNSILRTETRWVEWHGQKKKITCSRNAYNNMEKESGIVFLYWLVQLNSINLSLLLSFLSFQDIFCKGVLYKLKGDHLLMVQWLV

SEQ ID NO: 31899 - protein, 146 aa, Glycine max
  Clone ID: TF_GmC600_5.pep
PPHFVVGLNRTGKSCRLRWVNYLHPDLKRGKLTPQEQHLVMDLHSKWGNRWSRIARKLPGRTDNEIKNYWRTHMRKKKALEKKHASASASSPVCSSWESSLLANNHVVDSHASKESFYDTGGYDDMMMGLIGGEKGYSMDDIWKDI

SEQ ID NO: 31900 - protein, 136 aa, Glycine max
  Clone ID: TF_LIB5068-029-A1-XP1-E3.pep
IVDEFGNLFSWSLIASHLPGRTDNEIKNYWNSHLSRKIYTFHGKTTSKGIITLPPRRKRGRTSRWAMKNKNQKGSSSTQQQQQQIHHHLNNEVAVPLPPKPPLETEKYLSTNIILMEEQVDGSSTASTITNPGPAG

SEQ ID NO: 31901 - protein, 161 aa, Glycine max
  Clone ID: TF_15663951.pep
MRGIFLICLVENMGIARKCSYCGNLGHNARTCKSTPGQGQLKLFGVQLDVSSSPSSSNSFSSSSPSYSGMKRSFSTNYLLSSWASSSVPSSFSSPSLLGANENSDSYLLNANSLISTIQDTKKGVPWTEEEHRIFLIGLEKLGKGNWRGISKSFVTTRTPT

SEQ ID NO: 31902 - protein, 167 aa, Glycine max
  Clone ID: TF_GmC134810_1.pep
KRFTPEEDEKIKLAVFDYIESHGLGDEGLDMVLHCKSHPEIRDCWKEIGAALPQRPYVSVYTRAHILFERGEDRKWTPEEYEFLRKVKEQHGSDWKSVAEALGKHRFHVKDAWRRIKLTNTNQGRWTQEEYQNLFDLVNLDLRVRASQDYRKSKHGMLRDNIGWEAI

SEQ ID NO: 31903 - protein, 237 aa, Glycine max
  Clone ID: TF_GmC100_3.pep
RWSQIAARLPGRTDNEIKNFWNSTIKKRLKNMSSTTTTTSTSPNASETSISEPSNKDLNNMGGFISTLHNKHAGFVPMFGSSPSPSMMQTSTVFNNMIERFPMLEQGLINMPASGGYFEGTGSTPCFSQCEVHNNKGSCYLENEVFESVNIGVEGDMFVPPLENVTCKREETTNSSYFDDDINSILNNCNNIGIAENKAHHGVENLFQQELATATGEWDFEELMKDVSSFPFLDFSY

SEQ ID NO: 31904 - protein, 53 aa, Glycine max
  Clone ID: TF_LIB3030-010-Q1-B1-A6.pep
MGRPPCCDKVGIKKGPWTPEEDIILVSYIQEHGPGNWRSVPTNTGLSRCSKSC

SEQ ID NO: 31905 - protein, 356 aa, Glycine max
  Clone ID: TF_GmC144_1.pep
MTRRCSHCSNNGHNSRTCPSRGGGGVKLFGVRLTDGSIIKKSASMGNLNLSSAAAHHQFHSSPSSSNLAAAPSSPNPSSPCSDPPQGYLSDDPAHVSTFANRRGDRKKGVPWTEEEHRLFLIGLQKLGKGDWRGIARNFVVSRTPTQVASHAQKYFIRQSHATRRKRRSSLFDMVPDMSSDQPSVPEEQVLLPPSQNSQPCNGKSQPSLNLSLKSEFEPMETTSQENAQQTNETMMGSIGLTPMAPHGFFPAYLPVPFPMWPSTVAPPFEEVKGGETSHHQIHKPIPVIPKEPVNVDELVGMSHLSIGEAKVRDREPSPLSLKLLGEPSRQSAFHANAPVGTSDLNNGKDNAIQAV

SEQ ID NO: 31906 - protein, 360 aa, Glycine max
  Clone ID: TF_GmC144_2.pep
MTRRCSHCTNNGHNSRTCPSRGGGGVKLFGVRLTDGSIIKKSASMGNLNLSSSSSSAAAAHLQFRSSPSSSNLPAASSPNPSSPCSDPPQGYLSDDPAHVSTFANRRGDRKKGVPWTEEEHRLFLIGLQKLGKGDWRGIARNFVVSRTPTQVASHAQKYFIRQSHATRRKRRSSLFDMVPDMSSDQPSVPEEQVLLPPPENSQPCNGKSQPSLNLSLKSEFEPMETTSQENVQQTNEPMMGSNRLTPMAPHGCFPAYLPVPFPVWPSTWVHPFEEVKGGETCHHQIHKPIPVIPKEPVNVDELVGMSHLSIGEAQVRDREPSPLSIKLLGEPSRQSAFHANVPVGSSDLNNGKDNAIQAV

SEQ ID NO: 31907 - protein, 187 aa, Glycine max
  unsure (1)..(187): unsure at all Xaa locations
  Clone ID: TF_GmC84_5.pep
DQIESTRSTIFGSASNIHSRLEKQSENVAHIPSVGNNQTPKVRKPYTITKQREKWTEEEHQKFLEALKLYGRGWRQIEEHIGTKNAVQIRSHAQKFFSKVVRESEGSAESSIQPINIPPPRPKRKPLHPYPRKSVNSFKGHCIPNETEISXSTNLLVAENDTPSXNLVLSTXGSEAFGSQFQSRLTD

SEQ ID NO: 31908 - protein, 101 aa, Glycine max
  Clone ID: TF_LIB3030-004-Q1-B1-D11.pep
MSTSKSVSSSSEDDNELRRGPWTLEEDNLLSQYIFNHGEGRWNLLAKRSGLKRTGKSCRLRWLNYLKPDVKRGNLTPQEQLIILELHSKWGNRCLSCAFDS

SEQ ID NO: 31909 - protein, 98 aa, Glycine max
  Clone ID: TF_LIB3242-524-P1-J1-D7.pep
AGEDTRTCPRGHWRPAEDEKLRQLVEQYGAQNWNSIAEKLQGRSGKSCRLRWFNQLDPRINRRPFTEEEEERLLAAHRIHGNKWALIARLFPGRTDNA

SEQ ID NO: 31910 - protein, 316 aa, Glycine max
  Clone ID: TF_GmC1445_1.pep
MGRTPCCDKKGLKKGPWTAEEDEILSSYIKKNGGHGSWRSLPRMAGLLRCGKSCRLRWTNYLRPDIKRGPFTLEEEKLVIQLHGILGNRWAAIASQLPGRTDNEIKNLWNTHLKKRLKSMGLDPKTHEPLASSTYPFHKAPASVSTRHMAQWESARLEAEARLSNESSRFSHNTTNNSNSDNNKTTDSDYFLRIWNSEVGEAFRNVHHHKADDDNNNNKITTNTPTSSCHSPLSTGSSSNKCESIATNADLASNAPEIITPSSIVKQEFEWGTRGSDSSSSNDMEDSSDTALQLLLDFPINNDMSFLEGNSFVCPL

SEQ ID NO: 31911 - protein, 189 aa, Glycine max
  unsure (1)..(189): unsure at all Xaa locations
  Clone ID: TF_GmC1187_1.pep
MDKKQQCKTSQDPEVRKGPWTMEEDLILMNYIANHGEGVWNSLAKAAGLKRNGKSCRLRWLNYLRPDVRRGNITPEEQLLIMELHAKWGNRWSKIAKHLPGRTDNEIKNYWRTRIQKHIKQAENFQQXKVSTMAQPMETYSPPSYQGMLDPFSIQFPTNPHHSSCCTNDDDNNNYWSMEDIWSMQLANY

SEQ ID NO: 31912 - protein, 246 aa, Glycine max
  Clone ID: TF_GmC4565_1.pep
MGRSPCCEKAHTNKGAWTKEEDDRLISYIRAHGEGCWRSLPKAAGLLRCGKSCRLRWINYLRPDLKRGNFTEEEDELIIKLHSLLGNKWSLIAGRLPGRTDNEIKNYWNTHIRRKLLNRGIDPATHRPLNEAATAATVTTNISFGKQEQQETSSSNGSVVKGSILERCPDLNLELTISPPRQQQQTQKNLCFVCSLGLHNSKDCSCNVSNAVTVNNTTPSSAAAAAYDFLGMKTSGVWDCTRLEMK

SEQ ID NO: 31913 - protein, 218 aa, Glycine max
  Clone ID: TF_GmC6713_2.pep
MVSVNPSPAQGFYFFDPSNMVLPGVNNLPPPPPPAPPSHAAVEDPSKKIRKPYTITKSRESWTEREHDKFLEALQLFDRDWKKIEAFVGSKTVIQIRSHAQKYFLKVQKKGTSEHVPPPRPKRKAARPYPQKAPKTPTVSQVMGPLQSSSSFIEPAYIYIPDSSSALGTPVTNMPSSSWNYNNTPQSVNVPQVTRDDMGFTVAGQTAPLNCCCSSSNE

SEQ ID NO: 31914 - protein, 63 aa, Glycine max
  unsure (1)..(63): unsure at all Xaa locations
  Clone ID: TF_700907805H1.pep
MGXAPCCDKSNVKRGPWSPDEDATLKNYXEKHGTGGNWIALPKKAGLKRCGKSCRLRWLNYLR

SEQ ID NO: 31915 - protein, 460 aa, Glycine max
  Clone ID: TF_GmC5903_2.pep
AQEDETLRNAVAVFKGKSWKKIAEFFPDRSEVQCLHRWQKVLNPELVKGPWTQEEDDKIVELVSKYGPTKWSLIAKSLPGRIGKQCRERWHNHLNPDIKKDAWTLEEELALMNAHRIHGNKWAEIAKVLHGRTDNAIKNHWNSSLKKKLDFYLATGRLPPIPKNSPQVPVKDTIRRSASKSMLGCSNKELNAAVETSSETTAISKLDDSGRNQFESSGTVREVGDSSSVPANDSADSDCVECKPGSSNINPSCSNSEHVSRANFGTTFGPISENSGLNGNSTFEHFPIDSLYLNYTCQQNEYCPSPTMSPTGFFTPPRAKGSELCTETPESILRKAANTFPNTPSILRRRRTGAQTLTSPTKVLKVDNNPHTSNKTERTNDDSGSGHFSGSPASHGYGIGIPNNKAFNASPPYRLRSKRTAIVKSVEKQLEFAFDKEKNDDKRSNVMTEDRLHEKKLVVT

SEQ ID NO: 31916 - protein, 240 aa, Glycine max
  Clone ID: TF_GmC95395_1.pep
MEDSSAGEDTKTCPRGHWRPAEDEKLRQLVEQYGAQNWNSIAEKLQGRSGKSCRLRWFNQLDPRINRRPFTEEEEERLLAAHRIHGNKWALIARLFPGRTDNAVKNHWHVIMARKQREQSKLCGKRSFQDVYNDSNNTFLEKRTTPQSHHQDMLFSTRFGLENGIFFDFRSLDKNKDDSNNNNHRIVSDTPSSTSLASWNFGSVPTTTTKGARDNFNNTSRSSSVYLSECSRSSDRSFLY

SEQ ID NO: 31917 - protein, 237 aa, Glycine max
  Clone ID: TF_GmC937_3.pep
MERSSEEEMLITKGPWTEQEDSLLFNYITVHGEGHWNSVARYTGLKRTGKSCRLRWLNYLRPNVRRGNITLQEQLLILDLHSRWGNRWSKIAEHLPGRTDNEIKNYWRTRVVKQAKQLKCDVNSKQFRDTLRFVWMPRMLERIRAQASSSAQAHQSSLISNSNTQAHSGLLSSALHAHAPSLSDSSASYNLMGADAGSCSSHSYYSDIAGNGFGGADLWTDQNICFLQHQLAHHDLF

SEQ ID NO: 31918 - protein, 418 aa, Glycine max
  Clone ID: TF_GmC495_1.pep
MGRTPCCSHEELRKGAWTVQEDQKLITYIQKHGTGSWRTLPQKAGLKRCGKSCRLRWFNYLRPDIKRGKLSQEEEQTIIKLRAVLGNRWSSIAKHLPMRTDNEIKNYWNSYLKKQFEKNAVDPSSSKPNSTDSSSESKSNDTCMVPSEKTDCHEPNTSQSHQHNLSRSISSSTHLLNKVASKILASGYLELIKSCQPVVAGNSKSESVVKTGIGLESDNIRDPLEPNLTSPSHSITSAKLLNKMATSLPHKVHGLEAAKAVFSKLMENSEKGATASDDSFVGGCLNALSPFEDKPHITKTIDSPSGPTLMFNHVTTPSCFSEDNEDNWQCVSSNYVSFKICAANGGDCSVSEINLGESSSSTSSFLFENADLGTCDDEISKYIQYCREKNLWTSNANNVGITRPYDVRGRYLKRDNIS

SEQ ID NO: 31919 - protein, 326 aa, Glycine max
  Clone ID: TF_GmC5000_1.pep
MGRMPCCEKVGLNKGPWKTEEDEKLVAYVERHGPGNWRSVPAKAGLQRCGKSCRLRWINYLNPNIKRGSFSLEEHRTIVQLHSLLGNKWSIIAAHLPKRTDNDIKNYWNTNIKKGLIGKGLDPLTYKPIKSNTFQAYGGNFLDPSIDTTNMNHVAQSESAQIEAEARESMLQFGSLPSHLPGLILSKIPTQPFPSSASLLTQRINTTYDMYALVLATNHLDLHPPPFTDPESFPSRKLLPSVSTSVGQSTDPESSLSYDGIGYNMIDNSSSQMQMTMECYATNFEDDDVMIALEAFGIARFEGIQELFDGHTTIEVLINESFERDV

SEQ ID NO: 31920 - protein, 334 aa, Glycine max
  Clone ID: TF_GmC146_1.pep
MGRPPCCDKEGVKKGPWTPEEDIILVSYIQEHGPGNWRAVPAKTGLSRCSKSCRLRWTNYLRPGIKRGNFTEQEEKMIIHLQDLLGNRWAAIASYLPQRTDNDIKNYWNTHLRKKLKKMQVGCEGGSFGEGFSASRQIPRGQWERRLQTDIQMAKRALSEALSPEKPSCNLSASNSNPSDSSSSFSSTKPTTTQTVCYASSADNIARMLKGWMKNPPKSSRTNSSSVTQNSFNNFAAAGADTASSIGAKGPPSSAELSENNFESLFDFDQSLESSNSDEFSRSLSPEATVLQDESKPDVIGAEIMPFSLLEKWLLDEAGCQEKLVGCGDDAKFF

SEQ ID NO: 31921 - protein, 88 aa, Glycine max
  Clone ID: TF_GmC16783_1.pep
MSGKPLNSPRLLAMADSDLSSSQISTHSTDSGNRGSSKVEFSEDEETLIIRMYKLVGERWSIIAGRIPGRTAEEIEKYWTSRFSGSSE

SEQ ID NO: 31922 - protein, 88 aa, Glycine max
  unsure (1)..(88): unsure at all Xaa locations
  Clone ID: TF_GmC1167_2.pep
MGRPPCCDKVGIKKGPWTPEEDIILVSYIQEHGPGNWRSVPTXKGLSRCSKSCRLRWTNYLRPGIKRGNFTPHEEGMIIHLQALLGNK

SEQ ID NO: 31923 - protein, 209 aa, Glycine max
  Clone ID: TF_GmC744396_1.pep
MGRAPCCDKANVKKGPWSPVGDAALWAVFESSGTAGLWVALPQFAGLKRCGKSCRLRWLNYLRPNIKHGGFTEEEDNIICSLYISIGSRWSIIAAQLPGRTDNDIKNYWNTRLKKKLLGRRKQSNLSAKDTNNGIEENSYSNALSSSALERLQLHMQLQSLQNPFSFYNNPALWPKLHPFQEKMIQSLQSLNDGSSPVMQNALPNSHMS

SEQ ID NO: 31924 - protein, 326 aa, Glycine max
  Clone ID: TF_GmC1872_2.pep
MGRAPCCDKASVKRGPWSPEEDTKLKEYIEKHGTGGNWIALPQKAGLKRCGKSCRLRWLNYLRPNIKHGDFSDEEDRIICSLYVNIGSRWSIIAAQLPGRTDNDIKNYWNTKLKKKLMGLLPLSHHRKQPSFPSSFTLQNPPLSPSAHQLYGEYCTYTPTTTTSFTSNIEPPFSLPSSNYASTSDITTSVSHPFYQNQDSMQCYYPIMRDNSSNNNNNMLMFGSEGSCSTSSDGSCTQGREIIKQEERIGYHSYNNDYNFMLNHSNNINDGEKSCFGEWFSQTLLTPLDYDLEDIKQLISSSSSTTIFNNVDENKTEEKAMYYYYY

SEQ ID NO: 31925 - protein, 302 aa, Glycine max
  Clone ID: TF_GmC1514_1.pep
MGRAPCCDKANVKRGPWSPEEDATLKNYVETHGTGGNWIALPKKAGLRRCGKSCRLRWLNYLRPDIKHGGFTEEEDNIICTLYAEMGSRWSAIASKLPGRTDNDVKNYWNTKLKKKIMAGKVTLKTLTDNDTLPSISTPSLTNNQNVKTSQNSPFPSSQNQNSPPLDANNTFSISEKSIISFDQTHHGLYSPQVMDVVSQIGANSRIPNYNNNNNPVVSLSQEGSSSISDSSSIAMNNKNVSQPEQHANDDYESMEMLMDFGFGFPYDFANGPNCHYERVGELAPSSYPEWVDFSYADIKPH

SEQ ID NO: 31926 - protein, 119 aa, Glycine max
  Clone ID: TF_GmC140404_1.pep
MESQPLEKAKPKYRKGLWSPEEDNKLRNHIIKHGHGCWSSVPIKAGLQRNGKSCRLRWINYLRPGLKRGVFSKHEEDTIMVLHHMLGNKWSQIAQHLPGRTDNEIKNYWHSYLKKKEIK

SEQ ID NO: 31927 - protein, 308 aa, Glycine max
  Clone ID: TF_GmC1181_1.pep
MSTIAKRDLSSNEEESELRRGPWTLEEDSLLIHYIARHGEGRWNMLAKSAGLKRTGKSCRLRWLNYLKPDIKRGNLTPQEQLLILELHSKWGNRWSKIAQHLPGRTDNEIKNYWRTRIQKQARQLNIESGSKRFIDAVKCFWMPRLLQKMEQSNSPSPHHSSMTNMMNLGNSGEASMSSMSSSFNINPSMSSSSSPPQREFIMDDANHFNTMSNPINPSPDSFQFSQLLEISEHPKSPSNVFENNVCSYPIQDNCYVDTNNYGMEGINMDPLSAMDTYDFPQFDFQTAGNGWMLDSMGDSTLWNMEAM

SEQ ID NO: 31928 - protein, 220 aa, Glycine max
  Clone ID: TF_GmC1212_1.pep
MRKPCCDKENINKGAWSKQEDQKLIDYIQVHGEGCWRSIPKAAGLHRCGKSCRMRWLNYLRPGIKRGIFAEDEEDLIIKLHALLGNRWSLIAGRLPGRTDNEVKNYWNSHIRRKLIKMGIDPNSHKPHQSFPRPHVSSADHQGASTSESINNNKVPFFNSRGSAATDHHKISFTKEETSIISSPPLNLDLTISLPSPVEENKNSDHESAKTCDVDIDLNC

SEQ ID NO: 31929 - protein, 275 aa, Glycine max
  Clone ID: TF_GmC1729_1.pep
MVRAPCCEKMGLKKGPWAPEEDQILTSYIDKHGHGNWRALPKQAGLLRCGKSCRLRWINYLRPDIKRGNFTIEEEETIIKLHDMLGNRWSAIAAKLPGRTDNEIKNVWHTNLKKRLLKSDQSKSKPSSKRAIKPKIERSDSNSSIITQSEPDNFNFREMDTITSSACTTSSSDFSSVTVGDSKNIKSEDTESTETMPVIDESFWSEAAIDDETPTMSSSQSLTISNEMRLQYPFANYEETFQQGHHAYDSNFDDGMDFWYDIFTRTNDSIELLEF

SEQ ID NO: 31930 - protein, 274 aa, Glycine max
  Clone ID: TF_GmC1318_1.pep
MGRKANCDNQYAMNRGPWSAEEDKILMNYVQVHGEGKWRELSKRAGLKRCGKSCRLRWLNYLKPDIKRGNISSDEEDLIIRLHKLLGNRWSLIAGRLPGRTDNEIKNYWNTYLRKKAEHKHDKIPSHNDNIPIKLRIESPGCSKNSFGNVLDPTKSPHPMRCTKVMMPVNDSVNTTNLITTSWDNHNPSSASMQLDDYNHCLTGVLQEFDISDLLMSYEDDFRFNGYACVEIPQHIFEDETCRLDDSLGEEAWYENWKNDPYFPQDQDMGFSSF

SEQ ID NO: 31931 - protein, 108 aa, Glycine max
  Clone ID: TF_uC-gmroLIB3258087a02a1.pep
MYYCCCPLTGLKRNGKSCRLRWVNYLRPDLKRGQITPQEESIILELHARWGNRWSTIARSLPGRTDNEIKNYWRTHFKKKAKSPSDAAEKARNRLMRKQQFRQLRLQQ

SEQ ID NO: 31932 - protein, 304 aa, Glycine max
  Clone ID: TF_GmC203_1.pep
MVSKNPNPSEAFYLDPSGMSLPGILPFAAAATATADSFEDPAKKTRKPYTITKSRESWTEPEHDKFLEALQLFDRDWKKIEAFVGSKTVIQIRSHAQKYFLKVQKSGTNEHLPPPRPKRKAAHPYPQKASKTAPVLSQVSGSFQSSSALLEPGYILKHDSSAMPKTPIINTAVSSWSNNSLQKTTSVLHGQKQKVNNCCSSSRSPRAQLVGESNGQRNNSHPLRVLPDFAEVYSFIGSVFDPNVTGHVQKLKRMDPIDVETVLLLMRNLSINLASPDFEDHRRLLASYEVEPEVDKYKCRLNHA

SEQ ID NO: 31933 - protein, 77 aa, Glycine max
  Clone ID: TF_GmC6843_1.pep
NLTGVPWTEEEHRTFLVGLEKLGKGDWRGISRNYVTSRTPTQVASHAQKYFIRLATMNKKKRRSSLFDMVYIYIDPS

SEQ ID NO: 31934 - protein, 332 aa, Glycine max
  unsure (1)..(332): unsure at all Xaa locations
  Clone ID: TF_GmC6713_1.pep
MVSVNPNPAQGFYFFDPSNMTLPGVNNLPPPPPPAPAAPAAVEDPNKKIRKPYTITKSRESWTEQEHDKFLEALQLFDRDWKKIEAFVGSKTVIQIRSHAQKYFLKVQKNGTSEHVPPPRPKRKDAPPYPQKAPKTPTACHVMGPLLSSSIFIDCAYIYIYPAFFVLGWPASNMPLLRRLYNTTPQPGILLQVTRDDMGLTGAXQAAPLNCCVAAAEESTPPTWPRSKRINQGDQGKPIKVMPDFAQVYSFIGSVFDPNSTNHLQKLQQMDPINVETVLLLMTNLSVNLMSPEFEDHKRLLSSYDTDSDKSKFVNICSKSFTNKSESAVLSA

SEQ ID NO: 31935 - protein, 325 aa, Glycine max
  unsure (1)..(325): unsure at all Xaa locations
  Clone ID: TF_GmC1519_1.pep
MGHHSCCNQQKVKRGLWSPEEDEKLIRYITTHGYGCWSEVPEKAGLQRCGKSCRLRWINYLRPDIRRGRFTPEEEKLIISLHGVVGNRWAHIASHLPGRTDNEIKNYWNSWIKKKIRKPSTVTSSMTTTXVLIHQPQFNFNSNQLDHYGNQENLTAKPPMQETLFSSTCPLFMFDTSSLDQGTTTVDTTNNVRAELFQDSLGLSSSETWNMSHHQVHALPPQLAATFTATNVIDTTNYLPPLIENVENMVPNMEVQSCSIDEEGEMALECLRRQDLNEWVENQQQCPSFLFWDNINVEGQLRGEELAPNTSNMGNNTLSPFPSSL

SEQ ID NO: 31936 - protein, 157 aa, Glycine max
  Clone ID: TF_GmC1519_2.pep
MGHHSCCNQQKVKRGLWSPEEDEKLIRYITTHGYGCWSEVPEKAGLQRCGKSCRLRWINYLRPDIRRGRFTPEEEKLIISLHGVVGNRWAHIASHLPGRTDNEIKNYWNSWIKKKIRKTSSVSSTTIAQSIDHNSSDQFNYNSNLILYHFPNHDNNL

SEQ ID NO: 31937 - protein, 298 aa, Glycine max
  Clone ID: TF_GmC213_1.pep
DMDRIKGPWSPEEDEALQKLVEKHGPRNWSLISKSIPGRSGKSCRLRWCNQLSPQVEHRAFTAEEDDTIIRAHARFGNKWATIARLLHGRTDNAIKNHWNSTLKRKCSSTMIDDNTQPLKRSVSAGAAIPVSTGLYMNPPTPGSPSGSDVSESSLPVASSSHVFRPVPRTVKVLPPVETTSSSNDPPTSLSLSLPGVGVVDSSEVSNRTTEPIHVTPPLPHRSNTMPLLPMMTSVSATVMAPFNFSAEFRAVMQEMIRKEVRSYMELHNQNGMCFQAAVNDGFRNASVKRIGISRVDS

SEQ ID NO: 31938 - protein, 380 aa, Glycine max
  Clone ID: TF_GmC1582_1.pep
MAKSSTEKNGLKKGPWTPEEDQKLIDYIQKHGHGKWRTLPKNAGLKRCGKSCRLRWANYLRPDIKRGRFSFEEEEAIIQLHSVLGNKWSTIAANLPGRTDNEIKNYWNTHIKKKLLKMGIDPVTHTPRLDVIQLASILNTSLYNSAPQFNYPSLSGIGRSVINPSHMLGLLTTLLSCQNRNYNPDVLNNNQLSGGSTLLQNQHQCSRMQLDSTQAFQPNQPQVSLQENHIAKSNSNPLNMEPQVMKTTLENQITPIATPFSQQNTLPNLWHYNTEGHISDLPTMAQSSSAMQCFSSPKFNSIYNNLLENQNLCNNNEGMPNFNLSSLLSSTPSSSSPISTLNSSSSTTFVNGTTEDERDTYGSSMLMYNISNGLNDSGLL

SEQ ID NO: 31939 - protein, 197 aa, Glycine max
  unsure (1)..(197): unsure at all Xaa locations
  Clone ID: TF_GmC2603_2.pep
LVCVSYYCLPFRFKSNNGYFETCRWSRIARKLPGRTDNEIKNYWRTLMRKKAQDKKRGEAASSSSSSVDSSISSNNHAVDPHASKKAGEESFYDTGGHGVTASTQDQGQKGEQGLFSMDDIWKDIDNMSEENNTLQPVSVYEGHSEEGCNFSCPPQVPSPSSWEYSXDPLWVMDEESLFCPLSETIFFLLCTGHRFF

SEQ ID NO: 31940 - protein, 260 aa, Glycine max
  Clone ID: TF_GmC5898_1.pep
METMNVQVMRSLSDMVIKKGPWTEEEDSVLINYVNVHGEGHWNSLARSSGLKRTGKSCRLRWFNYLRPNVRRGNITLQEQLLILELHSHWGNRWAKIAEQLPGRTDNEIKNYWRTRVVKQAKQLKCHVNSKQFRDALRFVWMPRLMEQIQASSSSYGLDQTTLCNTQTHRDNSMVSSYSSEVDLQPPSLSDTSITSSSYNLIGDGGLSTESAEKGSIYSLWQHWDYSDIQAFEPCNGFGDADLWTDENMWFLQQHLADEL

SEQ ID NO: 31941 - protein, 110 aa, Glycine max
  Clone ID: TF_GmC148_2.pep
ILIHNSEYTGLLRCGKSCRLRWMNYLRPDIKRGNIAPEEDDLIIRMHSLLGNRWSLIAGRLPGRTDNEIKNYWNTHLSKKLKIQGTEDTDTHKMLENPQEEAASDGGNNN

SEQ ID NO: 31942 - protein, 279 aa, Glycine max
  unsure (1)..(279): unsure at all Xaa locations
  Clone ID: TF_GmC1382_1.pep
MGRAPCCSKVGLHRGPWTPREAFKYHVSSFFKIIFTNXSLPKTAGLLRCGKSCRLRWMNYLRPDIKRGNITPEEDDLIIRMHSLLGNRWSLIAGRLPGRTDNEIKNYWNTHLSKKLRNQGTDPNTHDKLTEAPEKKKGRKKNKQKSTENNKGSEKTLVYLPKPIRVKALSSCIPRTDSTLTLDSNSATTASTSQEKVQSPEAETKEVNMVWGVSDNIGDNGGIGIFFGEDHDLVNSASYMECYSDDHDTLEKLYEEYLQLLNVEEKPDELDSFAQSLLV

SEQ ID NO: 31943 - protein, 317 aa, Glycine max
  Clone ID: TF_GmC1121_2.pep
GPWSPEEDVILSRLVSKFGARNWSLIARGISGRSGKSCRLRWCNQLDPAVKRKPFTDEEDQMIVAAHAIHGNKWAAIARLLPGRTDNAIKNHWNSTLRRRGVGHDTIKLESGSFMEDVSLEKAKASSEDTLSCGDVSLKSSEGRDVSSMEIMDDKSDGKAQTEGQLHHEVKDPPTLFRPVARVSAFNVYHSFDGTQPSTSIPRSVSMQGPVLQSSKPDMEFYRALEGIFGDQSVPHQCGHGCCAAPNGRKSESSLLGPEFIEFSEPPSFPNFELAAIATDISNLAWLKSGLESSSVKIMGNTSGRVVSNGSQVHIGH

SEQ ID NO: 31944 - protein, 269 aa, Glycine max
  Clone ID: TF_GmC1225_2.pep
MGRQPCCDKLGVKKGPWTAEEDKKLINFILSNGQCCWRAVPKLAGLRRCGKSCRLRWTNYLRPDLKRGLLTQAEEQLVIDLHARLGNRWSKIAARLPGRTDNEIKNHWNTHIKKKLLKMGIDPVTHEPLNKQVSSKDSSSPAEHFSQVNNINIHQVEQNDGVLNSEENSTSSPAENSSGEESLLVDSICSDVSLINSMWLDETPLMDTLWDNTPKVENANNNMGLPIGEDNCAWLLDCQDFGIHDFGFNCFSEVETNVLQAIGMDRKGL

SEQ ID NO: 31945 - protein, 235 aa, Glycine max
  Clone ID: TF_GmC189_1.pep
MGRSPCCEKAHTNKGAWTKEEDHRLISYIRAHGEGCWRSLPKAAGLLRCGKSCRLRWINYLRPDLKRGNFSLEEDQLIIKLHSLLGNKWSLIAGRLPGRTDNEIKNYWNTHIRRKLLSRGIDPATHRPLNDSSHQEPAAVSAPPKHQESFHHERCPDLNLELTISPPHHPQPDHPHLKTLVTNSNLCFPCSLGLHNSKDCSCALHTSTANATATGYDFLALKTTVVLDYRTLHMK

SEQ ID NO: 31946 - protein, 117 aa, Glycine max
  unsure (1)..(117): unsure at all Xaa locations
  Clone ID: TF_GmC1295_1.pep
MGRAPCCDKANVKKGPWSPEEDETLKDYIEQHGTGGNWIALPQKVGLKRGGKSCRLRWLNYLRPNIKHGQFSDAEDKIICSLFASIGSXRWSIIASQLPGRTDNDIKNYWNTKLKKK

SEQ ID NO: 31947 - protein, 187 aa, Glycine max
  unsure (1)..(187): unsure at all Xaa locations
  Clone ID: TF_GmC2603_3.pep
MVQQEVRKGPWTEQEDFKLVSFVGLFGDRRWDFIAKVSGLKVAGESKIGIRQKKSNAYLGIMLQKNIDYGRRSLXPPHFVVGLNRTGKSCRLRWVNYLHPGLKRGKMTPQEERLVLELHSKWGNRWSRIARKLPGRTDNEIKNYWRTLMRKKAQEKKRGEAASSSPTPSSVDSSISSNNHAVDPHAK

SEQ ID NO: 31948 - protein, 212 aa, Glycine max
  Clone ID: TF_GmC861_1.pep
MKAMKRCSSSSSSSYSSASESTPQSNQNKNSNNFCYKIKGPWSAKEDRILTGLVEAHGPRNWASISRHIKGRSGKSCRLRWCNQLSPTVEHRPFSTREDEVILHAHARFGNKWATIARMLPGRTDNAVKNHWNATLKRRRFGADVVVEDDPLTALTLAPPGSGCCGRGEERRGVSPAGFWDAMRDVVAREVRGYVSSSFSDNLASNEGLSKY

SEQ ID NO: 31949 - protein, 296 aa, Glycine max
  Clone ID: TF_GmC875_1.pep
MTVDEIGSRYQWRKEQDKAFENALAIHPEDASDRWEKIAADVPGKTLEEIKHHYELLVEDVSQIESGYVPLPSYNSSPEGSTSHASEEGAGKKGGHSWNSNNESNHGTKASRSDQERRKGIAWTEDEHRLFLLGLEKYGKGDWRSISRNFVVTRTPTQVASHAQKYFIRLNSMNKDRRRSSIHDITSVNNGDVSAPQGPITGQTNGSADNSAGKSTKPAPPAPTAALGVGIYAGPTIGQPIGGPLVSAVGTPVMNLPPPAHMAYGLGAPVPGAVVPGAPMNLGPVPYPMPHTSARR

SEQ ID NO: 31950 - protein, 335 aa, Glycine max
  unsure (1)..(335): unsure at all Xaa locations
  Clone ID: TF_GmC1021_1.pep
DLAITPETIRQSXPKVNWNLMASLFVRGRSAAVRVSSRSYGGDPLINQGAWTNEEDKSLLLIVQDIGIRNWFDIATSLGTSRTPFQCLARFQRSLNPSMLNSEWTEEEDSQLCSAVASFGARDWQSVASVLERRTGTQCSNRWKKSLCPEKKGSFTREEDIRITVAVMLFGRKWNQIANYVPGRIQSQCRDRYLNCLDPSLKWGGWTEEEDLRLEAAVVKHGYCWSKIAEEVPPRTDSQCRKRWKVLCPEYVPLLQEARKKQRSIIGCNFVDRESERPAITLNDFLPLPVPAPKSDVGASNLRKKAKSSNVPKEMSKKCKKSSTSYQGSTRYRGI

SEQ ID NO: 31951 - protein, 560 aa, Glycine max
  Clone ID: TF_GmC5903_1.pep
MAEVVKSEECCQENKQSTAASCSSVSEGSGSAIHKSPGRCSPASTSPSHRRTTGPIRRAKGGWTAQEDETLRNAVAVFKGKSWKKIAEFFPDRSEVQCLHRWQKVLNPELVKGPWTQEEDDKIVELVSKYGPTKWSLIAKSLPGRIGKQCRERWHNHLNPDIKKDAWTLEEELALMNAHRIHGNKWAEIAKVLHGRTDNAIKNHWNSSLKKKLDFYLATGRLPPIPKNSPQVPVKDTIRRSASKSMLGCSNKELNAAVETSSETTAISKLDDSGRNQFESSGTVREVGDSSSVPANDSADSDCVECKPGSSNINPSCSNSEHVSRANFGTTFGPISENSGLNGNSTFEHCTNNGDRSSTRLIGTSSQENPTCGSLCYEPPQLDGSVPIDSLYLNYTCQQNEYCPSPTMSPTGFFTPPRAKGSELCTETPESILRKAANTFPNTPSILRRRRTGAQTLTSPTKVLKVDNNPHTSNKTERTNDDSGSGHFSGSPASHGYGIGIPNNKAFNASPPYRLRSKRTAIVKSVEKQLEYAFDKEKNDDKRSNVMTEDRLHETKLVVT

SEQ ID NO: 31952 - protein, 333 aa, Glycine max
  Clone ID: TF_GmC596_2.pep
MTRRCSHCSHNGHNSRTCPNRGVKLFGVRLTDGSIRKSASMGNLTHYAGSGSGPLHTGLNNPGSPGETPDHAAAVADGYLSEDFVPGSSSSSRERKKGVPWTEEEHRMFLLGLQKLGKGDWRGIARTYVISRTPTQVASHAQKYFIRQSNVSRRKRRSSLFDIVADEAADTAMVQQDFLSANQLPTETEGNNPLPAPPPLDEECESMDSTNSNDGEPAPSKPENTQSSYPMLYPAYYSPVFPFPLPYWSGYSPESTKKEETHEVLKPTAVHSKSPINVDELVGISKLSLGESIGDSGPSSLSRKLIEEGPSRQSAFHATPTCGSSNGSAIHAV

SEQ ID NO: 31953 - protein, 188 aa, Glycine max
  Clone ID: TF_GmC1812_2.pep
MCTSKSVSSSSEDDNELRRGPWTLEEDNSLSQYISSHGEGRWNLLAKRSGLKRTGKSCRLRWLNYLKPDVKRGNLTPQEQLIILELHSKWGNRWSKIAQNLPGRTDNEIKNYWRTRIQKQARHLKIDTDSREFQELVRRFWMPRLLQKAKESSSSAMSIQNQATPMPFDGVSQHSTVGTIPSHSHTPW

SEQ ID NO: 31954 - protein, 311 aa, Glycine max
  Clone ID: TF_GmC105_1.pep
MRLAMSTPSKSIICSSEDDYELRRGPWSVEEDYLLTHYIANHGEGRWNLLAIRSGLRRTGKSCRLRWLNYLKPNVKRGNLTSEEQLLIFELHSKWGNRWSKIAQQLPGRTDNEIKNYWRTRIQKQAIYAKFEDHRRAGFVEFVKGLQMTRCLHKSQESSPSAMSTQDQAIPLPFDGVTVPHYSSFGIGTTPTIQITCHGDLNHLNQHEQNSDSEHHNSSCISSSESANIPNMSQPFGYTTSQFQALDNCDFGMCLYDGYSIDNNSYDRDALNLTTTMVAGNLELPVFDCQTLETNRLNKEFASSTWSMDEL

SEQ ID NO: 31955 - protein, 201 aa, Glycine max
  Clone ID: TF_GmC1241_1.pep
MGVLSNMIDREQLKPGDHIYSWRQAYIYAHHGIYVGDGMVIHFTRGAGQEIGTGTVLDNLLFSSSPSHSSDTPCPRCGDQTRTDGVISSCLDCFLYGGNLYIFEYGVSPAFFLAKARGGTCTLAPSDPTEDVLHRSSFLLENGFGVYNIFKNNCEDFAIYCKTGLLVSTSVSVGRSGQAASYLAAASTLVSTPLRFMTTSF

SEQ ID NO: 31956 - protein, 222 aa, Glycine max
  Clone ID: TF_GmC1241_2.pep
MINCDGVFGLVIEGVPWTEEEHRLFLLGLHKVGKGDWRGISRNFVKTRTPTQVASHAQKYFLRRHNQNRRRRRSSLFDITTDTVMESSTIMEEEQVPQETMAAPIPAAYPPFPGAGFPMSLSPVVLPVSGERLTKPIRPTPIVPVPPSSKMANLNLKGKASRTNLIEPLPLSLNLPSPTPRSQDQSPANSGHSSPSSSSAAAFQAMSAAKFGGGGDSIISVA

SEQ ID NO: 31957 - protein, 168 aa, Glycine max
  Clone ID: TF_GmC1241_3.pep
MSRTCSQCGNNGHNSRTCTDGGAAASCGGSPRENGIMLFGVRVMTEANSSFRKSASMNNLSQYDAESNAADAGYASDDVVHASGRTRERKRGVPWTEEEHRLFLLGLHKVGKGDWRGISRNFVKTRTPTQVASHAQKYFLRRHNQNRRRRRSSLFDITTDTVMGIFYY

SEQ ID NO: 31958 - protein, 91 aa, Glycine max
  Clone ID: TF_GmC421653_1.pep
MDTISVQAMRSLSDSDSLSSATYASEEDMKIKKGPWTEEEDSVLINYVNFQGEGQWNSLARSACLKRTGKSCRLTWLNYLLPNVLRGNITL

SEQ ID NO: 31959 - protein, 106 aa, Glycine max
  unsure (1)..(106): unsure at all Xaa locations
  Clone ID: TF_GmC142751_2.pep
MGRAPCCDKNGLKKGPWTTEEDQKLIDYIQKNGYGNWRTLPKNAGLQRCGKSCRLRWTNYLRPDIKRGRFSFEEEETIMQLRFILGNKWTGIAXRFPGRIHDEIKN

SEQ ID NO: 31960 - protein, 364 aa, Glycine max
  Clone ID: TF_GmC850_1.pep
MGRAPCCDKANVKKGPWSPEEDAKLKSYIEKHGTGGNWIALPQKIGLKRCGKSCRLRWLNYLRPNLKHGGFSVEEDDIICSLYVSIGSRWSVIAAQLPGRTDNDIKNYWNTRLKKKLLGKHRREPRNRGNYNSVKQENDVNRGSGTTDGDSSSLSLLQENGSTTHHQEQHQQQPCWPQNINNMPVLPLQVPLPYKNQGPCFNDQDSLKKLLIKLGGRFSGDSYHPTLDGLNLEFSSHGQQIYQEQVHVGSSAACISATINNNNEVQFAQTGQYPGVDNLVQGQGGNFTPSFEEMVSSSNYPDGLEFLYNEGMIDHKIIDTTTTTTWGETSTPIYHHHDSLASTYQGQGVIQECVLQDFSYPRAQ

SEQ ID NO: 31961 - protein, 340 aa, Glycine max
  Clone ID: TF_GmC1872_1.pep
MGRAPCCDKANVKRGPWSPEEDSKLKDYIEKHGTGGNWIALPQKAGLKRCGKSCRLRWLNYLRPNIKHGEFSDEEDRIICSLYANIGSRWSIIAAQLPGRTDNDIKNYWNTKLKRKLMGLLPSSHQRIAPYQQFSSQNPSSFPSHSSLSSSQYRDYYYNSSHHYYIPAPTSSFTCLEPISAPSSNYTNTTTTSNSLSFYQHQEPLVSVSPRQYYPITDSSMLVFGSETSCSSSDGSCSQVSLGREIKQEDMGFQNFMFGDHQNMNKFMNINHDGGEEYVNQWTQRPNGYIFQTQQTALDYDLEVIKNLICSNSSSNSNNGYLSVDENKTEEKGVYYNYCN

SEQ ID NO: 31962 - protein, 226 aa, Glycine max
  Clone ID: TF_GmC482_1.pep
VFLNRMEATNRSSSSTSSSSDCCSSESNPNKPDRIKGPWSAEEDRILTGLVERYGPRNWSLISRYIKGRSGKSCRLRWCNQLSPAVEHRPFSAQEDDTIIAAHAQYGNRWATIARLLPGRTDNAVKNHWNSTLKRRAKGININVNHANNEVAASSSAPSRHFDFEDDPLTALTLAPPGIANGTVAEDAVPDHRASPEGFWDMMRDVIAREVREYVSSNFSDNSGFH

SEQ ID NO: 31963 - protein, 371 aa, Glycine max
  Clone ID: TF_GmC651_1.pep
MGRAPCCEKVGLKKGRWTAEEDEILAKYIQANGEGSWRSLPSLEGLLRCGKSCRLRWINYLRADLKRGNISAEEENTIVKLHASFGNRWSLIANHLPGRTDNEIKNYWNSHLSRKIYSFPGAGAGASAGIMDTPKVVYIPPKRKCGRTSRWAMKKNKTYTQKVNDRINQRHTQIGFPQQNSDTAVPTPPTPSLESEGLSNAVNDFKVLDGDVAEFDEPRTEELEAEVNKRDNSVGGVEESSNTDEDILGLCELEGINEDSGMLLGFSDILESCLAETTCGVWDISEERESNDVVAADACRDKIASSEEGSCSSMNQDWDWESVLEFSNAVDNWEDQDKLLTWLWEDDDCKRLGETDTQILQNDMVIDWFLS

SEQ ID NO: 31964 - protein, 293 aa, Glycine max
  Clone ID: TF_GmC1386_1.pep
MMRTPISSDESGLKKGPWSPEEDKILVDFIEKHGHGSWRALPRLAGLNRCGKSCRLRWTNYLRPDIKRGKFSDEEEQLIINLHSVLGNKWAAIASHLPGRTDNEIKNLWNTHLKKKLMQMGLDPVTHRPRTHHLNLLSNLQQILALIRLQSDANKLQLLQNIFEASNSDPLPDSSYSLLNDVLGGLNNLHSNDLHNLYDGNSLSVQNFDQNLNGGRNAEPSPSSNSLPNLVSASPDRSPVVKEAQNILVNSKDFSTSAFELTWGDFMDEEETNQTYWKGFMDQHSNQTWSTFP

SEQ ID NO: 31965 - protein, 301 aa, Glycine max
  Clone ID: TF_GmC1766_1.pep
MVSKNPNPPEGFYLDPSGGMPLPGMPPFASVSAATAANSPEDAAKKIRKPYTITKSRENWTEPEHDKFLEAIQLFDRDWKKIEAFVGSKSVIQIRREAQIYFLKVQKRGTSEHLPPPRPKRKAAHPYPQKASKNAPVLSQVSGRFQSSSALLEPGYILKNDAPPMLKTPIMNTVASSWSNNTLQTANLSPVTKVNNPCSSGESTPKVWPVGESNGQGNKIHPLRVLPDFTQVYGFIGSVFDPNATEHLQKLKKMDRIDVETVLLLMRNLSINLTSPDFEDHRKLLSSYEVEPERDDNYQRG

SEQ ID NO: 31966 - protein, 315 aa, Glycine max
  unsure (1)..(315): unsure at all Xaa locations
  Clone ID: TF_GmC205_1.pep
MGRSRVALRSADDDPNHRSKRKKAALNVENSETLPTGQGVTTSKVSLYHCNYCNKDISGKIRIKCAVCQDFDLCLECFSVGAEVTPHKSNHPYRIXDWNADEELLLLEGIETYGFGNWNEVAEYVGTKTKSQCIDHYNAVYMNSPCFPLPDLSHVMGKNKVELCAMAKGHEAKKEFSLTAELTLKEEALFTDRINYEESKNAEINNQTMSRLTSACGKAYPSTIKKASNVIQNNGGVKVEESRADWSIGEKKPKLSGEDRPSMTDLSGYSFKREEFDVEYDNDAEQVLADMEFKDTDTKAEYAMKLHVLHIYSKR

SEQ ID NO: 31967 - protein, 87 aa, Glycine max
  Clone ID: TF_LIB4198-004-Q1-K1-G1.pep
MGRPPCCDKGVKKGPWTPEEDIILVSYIQEHGPGNWKAVPANTGLSRCSKSCRLRWTNYLRPGIKRGNFTDQEEKMIIHLQALLGNR

SEQ ID NO: 31968 - protein, 223 aa, Glycine max
  Clone ID: TF_GmC1378_1.pep
KSCRLRWINYLRPDLKRGGFTEMEEDQIIQLHSCLGNRWSKIASHFPGRTDNEIKNHWNTKIKKRLKLLGLDPLTLKPSEQKEKSVDDKKNIELQPNTSKGSEQGVENKSLDMHSTREVPKTEGKIEENKVTWDDTTGFFNNYEMLCSQLDLGSWMSQETKTSTSSYCSSSFSLDDSSNLSVGESSYLQENSLQQWVDGLDSILSWDSFNPLEKDFLFLDNRQ

SEQ ID NO: 31969 - protein, 268 aa, Glycine max
  Clone ID: TF_GmC314_1.pep
MDRVKGPWSPEEDEALRRLVQAHGPRNWSVISKSVPGRSGKSCRLRWCNQLSPQVAHRPFSPDEDEAIVRAHARFGNKWATIARLLNNGRTDNAVKNHWNSTLKRKKCSAVSDDVTDRPPLKRSASVGPAHLNPGSPSGSDLSDPSLPALSNPSPSAHYRPNLMETASSACDPATSLSLSLPGFGSGSNPVCAPRPVSVSPPSPPPAEPVEQRGKQMFNAEFLRVMQEMIKKEVRSYMSGMEQKNGFRMQTEAIGNAVVKRMGISNIE

SEQ ID NO: 31970 - protein, 393 aa, Glycine max
  Clone ID: TF_GmC145_1.pep
MTEEDRSAQETVHNGVASTELGGEEMDIAEVTAAGRVKGPWSPEEDALLSRLVAQFGARNWSMIARGVPGRSGKSCRLRWCNQLDPCVKRKPFTEEEDSIIVSAHAIHGNKWAAIARLLPGRTDNAIKNHWNSTLKRRCMEMGRYVPAHADVMEDGTGSFDKTKASSEETMSIGDINSKNPAEVRNVMMDNENKPPTKDDAKVEEHPTLHRPVARVSAFSVYNTPGRSTMGSCSKMFPRQSPLIQSPKPDVGSCKLFDDIDCEPMVPSQCGHGCCTGDSRESHSHGSLLGPEFVDYLESPSSSHAFISIATDLNNIAWIKSGLENCSTGVTENTANLTASRGVASALQTNFLGQDLKNGYGQFEEGHGMFLGAMQEVLSTKMARQHYAMPAEV

SEQ ID NO: 31971 - protein, 112 aa, Glycine max
  unsure (1)..(112): unsure at all Xaa locations
  Clone ID: TF_GmC5794_1.pep
KFLGYPLDGLSQMAQERKKGVPWTEEQHRIFLVGLEKLGKGDWRGITRDEVLXNYPTTRGQPHVEVHAQNYFLRLEKIDKKNRRLSLFDLDGSNKVYSNSITDHHDNFSLNE

SEQ ID NO: 31972 - protein, 282 aa, Glycine max
  unsure (1)..(282): unsure at all Xaa locations
  Clone ID: TF_GmC900_1.pep
MVSLNLNPNPPQTFHFFDPFNMEDQNKKVRKPYTITKSRENWTDQEHDKFLEALHLFDRDWKKIEAFVGSKTVIQIRSHAQKYFMKVQKNGTSEHVPPPRPKRKAAHPYPQKASKNALTISQVARPLQSSSALSESSHIYRPDSSSVVRTPVRQCGXLPSWGYNVTPLVSLPRVTKDDMVLMSQQINPFSSSNENTPRGWPISKQTDQGDQGKPTIVMPDFAQVYSFIGTVFDPNAINHLQRLKQMDPINVKTILLLMRNLSTNLRSPEFENERRDAVIVLC

SEQ ID NO: 31973 - protein, 138 aa, Glycine max
  Clone ID: TF_GmC953290_1.pep
MGYQPLEKGKPKHKKGLWSPEEDNKLRNHILKHGHGCWSSVPIKAGLQRNGKSCRLRWINYLRPGLKRGKFSKQEEETILTLHHMLGNKWARMSQPLPAWSVFESFTFWRSLLRKRVALALAVESLDQVLSASSSSDT

SEQ ID NO: 31974 - protein, 332 aa, Glycine max
  unsure (1)..(332): unsure at all Xaa locations
  Clone ID: TF_GmC100_1.pep
MRKPEACNNNTKNNSNKKLRKGLWSPEEDDKLMNYXMLNHGQGCWSDVARNAGLQRCGKSCRLRWINYLRPDLKRGAFSPQEEELIIHFHSLLGNRWSQIAARLPGRTDNEIKNFWNSTIKKRLKNMSSTTTTTSTSPNASETSISEPSNKDLNNMGGFISTLHNKHAGFVPMFGSSPSPSMMQTSTVFNNMIERFPMLEQGLINMPASGGYFEGTGSTPCFSQCEVHNNKGSCYLENEVFESVNIGVEGDMFVPPLENVTCKREETTNSSYFDDDINSILNNCNNIGIAENKAHHGVENLFQQELATATGEWDFEELMKDVSSFPFLDFSY

SEQ ID NO: 31975 - protein, 195 aa, Glycine max
  Clone ID: TF_uC-gmflLIB3275P058b05b1.pep
PTRSGSGGSGGRSGGDQGGGNVEDVALKKGPWTTAEDAILTDYVTKHGEGNWNAVQRNTGLNRCGKSCRLRWANHLRPNLKKGAFSPEEEKIIVDLHSQFGNKWARMAALLPGRTDNEIKNYWNTRIKRRQRQGLPLYSDEHDHNHRSTTPTSTTTPSPCLTPTGSNPNIATSFEFFNQNQQQQQQYQHQYQYQT

SEQ ID NO: 31976 - protein, 429 aa, Glycine max
  Clone ID: TF_GmC6801_1.pep
MGRSPCCEKTGLKKGPWTPEEDQKLIAFIEKHGHGSWRALPAKARLRRCGKSCRLRWSNYLRPDIKRGKFSLQEEQTIIQLHALLGNRWSAIASHLPKRTDNEIKNYWNTHLKKRLDKMGIDLTTHKPKNESLAYSKDGSNLGHMAQWESARLEAEARLVRESKLQEQQNNLGPMSSPSSTQITRLVLNKITPLQQKQHSLPPCLDVLKAWQSSWSNNNNNINKYSSLNDKKKTMHVRSMYAMMLSNDDLESPTSTLCFPESVQMNNNNNNSNAMVSTDHLGLINENYLLPPTTLDEFIITKSLGTTSSEGAIETVNGGGSDSWRYFTKHNNEEEQVETDEKTIMYDTISCLQDDDGDIMVAVEALRGAGYYDDDNNSNNNNVTFTHLSSNVNNMVGFENDFDSNEDLAAVNLHVNFEENKDYWNGMLN

SEQ ID NO: 31977 - protein, 333 aa, Glycine max
  Clone ID: TF_GmC596_1.pep
MTRRCSHCSHNGHNSRTCPNRGVKLFGVRLTDGSIRKSASMGNLTHYAGSGSAPLHVGLNNPGSPGETPDHAAAAADGYASEDFVPGSSSSSRERKKGVPWTEEEHRMFLLGLQKLGKGDWRGIARNYVISRTPTQVASHAQKYFIRQSNVSRRKRRSSLFDIVADEAADTAMVQQDFLSANELPTETEGNNPLPAPPPLDEECESMDSTNSNDGEPAPSKPENTHPSYPMLYPAYYSPVFPFPLPYWSGYSPEPTKKEETHEVLKPTAVHSKSPINVDELVGISKLSLGESIGDSGPSTLSRKLIEEGPSRQSAFHATPTCGDMNGSAIHAV

SEQ ID NO: 31978 - protein, 133 aa, Glycine max
  Clone ID: TF_9565839.pep
MRTPSSSHKSGLNKGTWTPEEDAKLIAYITRYGSWNWRQLPRFAGLARCGKSCRLRWLNYLRPNIKRGNYTKEEEEIIIRLHEKLGNKYALTFQAKLNFPQHCTASKARQGNYKIFPYFNTYRPMHLAKSTHN

SEQ ID NO: 31979 - protein, 115 aa, Glycine max
  Clone ID: TF_jC-gmXLIB3563P067bd03a2.pep
MGRQPCCDKLGVKKGPWTAEEDKKLINFILSNGQCCWRAVPKLAGLRRCGKSCRLRWTNYLRPDLKRGLLTQAEEQLVIDLHARLGNRFSIFYLLGFQALPCVCSPEIITQFMTM

SEQ ID NO: 31980 - protein, 302 aa, Glycine max
  Clone ID: TF_GmC1277_1.pep
MSSSGTIWSYEEEKAFENAIAMHWIEESSKEQWEKIASAVPSKSMEDVKQHYQVLVEDVSAIEAGHISFPNYAASEEITSSNKDFHGSSKATSSDKRSNCNYGRGFSGLGHDSTTHSSGKGGLSRSSEQERRKGIPWTEEEHRLFLLGLEKFGKGDWRSISRNFVISRTPTQVASHAQKYFIRLNSMNRDRRRSSIHDITSVNNGDVANNQAPITGQHSSTIPSNTMGVGQSLKHRVQGHIPPGLGMYGTPVGHPVAAPPGHMASAVGTPVMLPPGPHPHAHPHPPYVLPLAYPMAPPTMHQ

SEQ ID NO: 31981 - protein, 209 aa, Glycine max
  Clone ID: TF_GmC7451_1.pep
MTRTPCCERMGSKKGPWTAEEDQILVSHIQQYGHGNWRALPKQAGLLRCGKSCRLRWINYLRPDIKRGKFSKEEEHTILKLHGIRGNRWSAIAASLPGRTDNEIKNFWHTHLKKRIQKSGVHNGNPSSRILQEAQANTSSNASSVMIANYGLPSRNINPPIAGFYGAVSSDTFGEIKDNHGSCQLSEEMEFWYNIYSSNQGKHHETMEI

SEQ ID NO: 31982 - protein, 268 aa, Glycine max
  Clone ID: TF_GmC9784_1.pep
GILHPSAKDMDRIKGPWSPEEDEALRRLVQTYGPRNWSVISKSIPGRSGKSCRLRWCNQLSPEVERRPFTAEEDEAILKAHARFGNKWATIARFLNGRTDNAIKNHWNSTLKRKCSEPLSEPRPLKRSATVSGSQSGSDLSDSGLPIILARSVSVTVAPSNHLAETASSSVTDPATLLSLSLPGFDSCDGANNGPGPNQGPSCGPFQEIPMLGSQKQLFSQEFMKVMQEMIRVEVRNYMSVLERNGVCMQTDAIRNSVLERMGIGRVE

SEQ ID NO: 31983 - protein, 194 aa, Glycine max
  unsure (1)..(194): unsure at all Xaa locations
  Clone ID: TF_GmC1460_1.pep
MGKAPCCEKHGVRRGAWTPEEDQALVDYIQKHGHGSWRSLPKHAGLLRCGKSCRLRWINYLRPGIKRGPFTSEEESTIVQLHGMLGNRWASIASQLPGRTDNEIKNFWNTHLKKRLLRSCHSQRAKQLCVIPDQSIVKSESPSTRHMVQWESVRVETEARLSLESTMLNSWPTSKTCPDHFLXLWHSEVGKSFA

SEQ ID NO: 31984 - protein, 309 aa, Glycine max
  Clone ID: TF_GmC563_1.pep
MNRGIEVLSPASYLRSSNWLFQESLGTRWTPQENKLFENALAVFDKDTPDRWLKVAALIPGKTVGDVIKQYRELEEDVSVIESGFIPLPGYTAADSFTLEWVNNQGFDGLRQFYGVTGKRGASTRPSEQERKKGVPWTKEEHRQFLMGLKKYGKGDWRNISRNFVTTRTPTQVASHAQKYFIRQLSGGKDKKRSSIHDITMVNLPEAKSPSSESNNRPYSPDHSVKDVNPPSQNQRLSTTMVIKQEHDWKLPCETVPMLFNSTNGNMFMTPLCGISSYGSKPLQEQYFLSGCQFGPYDTIMQMPSMQNQ

SEQ ID NO: 31985 - protein, 199 aa, Glycine max
  unsure (1)..(199): unsure at all Xaa locations
  Clone ID: TF_uC-gmflLIB3275P072d07b1.pep
MVRAPCCEKMGLKKGPWTPEEDQILMSYIQKHGHGNWRALPKLAGLLRCGKSCRLRWINYLRPDIKRGNFSSEEEEIIIKMHELLGNRWSAIAAKLPGRTDNEIKNVWHTHLKKRLLNSDIQKRVSKPRIKRSDSNSSTLTQLEPTSSACTTSLSDFSSFSEGTKNMDNMIKSEDIESVETIMPPIDESXWSKATVDYE

SEQ ID NO: 31986 - protein, 126 aa, Glycine max
  unsure (1)..(126): unsure at all Xaa locations
  Clone ID: TF_LIB4164-016-Q1-K1-E9.pep
MVQDMKQQDNGESKKKERHIVTWTQEEDDILREQIGIHGTENWAIIASKFKDKTTRQCRRRWYTYLNSXFKKGGWSAEEDMLLCEAQXRVFGXRWTEIAXVVSGRTXYAVXNRFXTLCRKNRNMQL

SEQ ID NO: 31987 - protein, 134 aa, Glycine max
  Clone ID: TF_GmC134308_1.pep
VQRQTLPTISSTDGIETKGIVGGNMASKRKRKAWSEEEDMQLRAAVQRWGEGNWATMAKGDDFPIKRSATQLAQRWSILRKKDGCTNTGTITSTQYTTAEQLATRHSLSLALDMPFKKLTAPGMTDEQTCYPFG

SEQ ID NO: 31988 - protein, 141 aa, Glycine max
  Clone ID: TF_LIB3242-217-Q1-J1-G4.pep
QRQTLPTISSTDGIETKGIVGGNMASKRKRKAWSEEEDMQLRAAVQRWGEGNWATMAKGDDFPIKRSATQLAQRWSILRKKDGCTNTGTITSTQYTTAEQLATRHSLSLALDMPFKKLTAPGMTDGNFLWNFIYFILIYLY

SEQ ID NO: 31989 - protein, 201 aa, Glycine max
  unsure (1)..(201): unsure at all Xaa locations
  Clone ID: TF_LIB4167-068-Q1-K1-D10.pep
MGRSRVALRSADDDPNHRSKRKKAALNVENSETLPTGQGVTTSKVSLYHCNYCNKDISGKIRIKCAVCQDFDLCLECFSVGAEVTPHKSNHPYRIMDNLSFPLICTDWNADEELLLLEGIETYGFGNWNEVAEYVGTKTKSQCIDHYNAVYMNSPCFPLPDLSHVMGKNKVELCAMAKGHEAKKEFSLTAELTLKEEAXXT

SEQ ID NO: 31990 - protein, 321 aa, Glycine max
  Clone ID: TF_GmC78832_2.pep
MEFETSYPTCFMSNSSWFSQESHYTEWTREENKKFESALAIYDKDTPDRWLRVAAMLPGKTVYDVIKQYRELEEDVCEIEAGRIPVPGYPTSSFTLKMVDNQCYDACRKKPATLRSSDQERKKGVPWTEEEHRRFLMGLLKYGKGDWRNISRNFVVTKTPTQVASHAQKYYIRQKLSGGKDNKRRPSIHDITIVNLTSDQEKPLLLNDESHMTFEQQKLTSMPKVQLEWINHHDNGSRMVVNPNYDMFMSPSSGISSKTLKLQGQDFYECAFHETYAKLKNSGFRTTSRDFNKEDSICITGCAIQVANSLADVADSHEHLN

SEQ ID NO: 31991 - protein, 177 aa, Glycine max
  unsure (1)..(177): unsure at all Xaa locations
  Clone ID: TF_GmC6850_3.pep
MQLGWEGASKKESHNNRINTHTETRQEQDRATDMKKQQQQEKHKKQMVNEESKKKERHIVTWTQEEDDILREQIGVHGTENWAIIASKFKDKTTRQCRRRWYTYLNSDFKKGGWSPEEDMLLCEAQKIFGNRWTEINRVVSGRTDNAVXNCFSTLCKKRAKYEXLSKREQHFIHQFK

SEQ ID NO: 31992 - protein, 206 aa, Glycine max
  Clone ID: TF_GmC946_1.pep
MCSAEKDGIMLFGVRLSVVDNHPTSFRKSASMTNLSQYESPPPHDPNAGYASDDVVHPSRHTRERKRGVPWTEEEHRLFLLGLQNIGKGDWRGISRNFVKTRTPTQVASHAQKYFLRRHTQNRRRRRSSLFDITTDSVMEPWPEKEEEQVVLPSARSKPVLPVPPSSKMAELDLSGKSLSLKLPVSKPPISNENFGGIPLSVLLEG

SEQ ID NO: 31993 - protein, 348 aa, Glycine max
  Clone ID: TF_GmC1327_1.pep
MGRAPCCDKANVKKGPWSPEEDAKLKSYIEQHGTGGNWIALPQKIGLKRCGKSCRLRWLNYLRPNIKHGGFSEEEDNIICSLYVSIGSRWSIIAAQLPGRTDNDIKNYWNTRLKKKLLGKQRKEQQAQARRVSNNQQKQDVKRETENLIVASEVMINQVPYWSSSEFSSVPMPVTNASSFQHYGLNNQTSLRSMMVNKLEGITFSNDHHQQQQQPYTNACEIPSLQDQVFPTMVNQVTVVSNENNSGTYQPSNIFQGFENFPSDFCELVCVNPQQMEAFNYGMESMDMTMSNGGSTNTTSTESTSWGDMSSLVYSPLVSDYERCRQGIIPQDHVVAFEECKYFGMQMQ

SEQ ID NO: 31994 - protein, 206 aa, Glycine max
  unsure (1)..(206): unsure at all Xaa locations
  Clone ID: TF_LIB5118-018-A1-PF1-G7.pep
MEEMNRSSSSTSSSSHCCSLESNHRSPNKPDRIKGPWSAQEDRILTRLVEQYGPRNWSLISRYIKGRSGKSCRLRWCNQLSPTVEHRPFSTQEDETIIAAHARXXNRXATIARLLPGRTDNAVKNHWNSTLKRRAKGINVNVNDADNEDDPLTALTLAPPGIANATLTEDAVPDHRASPESAAEGFWDMMRDAIAREVRENAPSNF

SEQ ID NO: 31995 - protein, 380 aa, Glycine max
  unsure (1)..(380): unsure at all Xaa locations
  Clone ID: TF_GmC84_4.pep
MEMQDQIESTRSTIFGSASNIHSNAEKQAENVAPKVRKPYTITKQREKWTEEEHQKFLEALKLYGRGWRQIEEHIGTKTAVQIRSHAQKFXSKVVRESEVSDEGSIQPINIPPPRPKRKPLHPYPRKSVNSFRGPTIPNEQKXSPSTNLLVAEKXTPSPTSVLSTVGSEAFGSQFSEQTNRCLSPNSCTTDIHSVSLSPVEKENDCMTSKESEEEEKASPASRPLSTVSNPKMCMKPEFSSKEIEDATDMPQTTSIKLFGRTVSMVGNQKSLKIDDDGKPITVKSDEVDDVENEKLGQSGESKQVDTQLSLGVVSGNWPITPDADGANVTSIEPPKENQCFSESAPDAFFPQWSLSQGLPPFYLRPCNQVLIPCLLGPPL

SEQ ID NO: 31996 - protein, 307 aa, Glycine max
  Clone ID: TF_GmC283_1.pep
DMELETIYPPCFMPNSNWFVQESHSTEWTREDNKKFESALAIYDNDTPDRWFKVAAMIPGKTVFDVIKQYRELEEDVSEIEAGRVPIPGYLASSFTFELVDNHNYDGCRRRLAPVRGSDQERKKGVPWTEDEHRRFLMGLLKYGKGDWRNISRNFVVTKTPTQVASHAQKYYIRQKVSGGKDKRRPSIHDITTVNLTETSASDKNKPQLFNASPVLAPQQKLNSISKVQLGWTSSHYNDGSFMVFNPNSDALFVSSSPDVTSMALKMQGQDLYDCALHEAYAKVKVPGFSMAPRDFNNEAVFGIHAL

SEQ ID NO: 31997 - protein, 236 aa, Glycine max
  Clone ID: TF_GmC948_1.pep
MFQESSATRWPTQPTQWTRYHDKLFERALLVVPEDLPDRWEKIADQVPGKSAVEVREHYEALVHDVFEIDSGRVEVPSYVDDSVATPPSGGAEISTWDNANQISFGSKPKQQGDNERKKGTPWTEEEHRLFLIGLSKFGKGDWRSISRNVVVTRTPTQVASHAQKYFLRQNSVKKERKRSSIHDITTVDSNSVPVPIDQNWVPPPGGSVQQSLQYPSSNMLDQMGTFGYSNYGFGM

SEQ ID NO: 31998 - protein, 233 aa, Glycine max
  Clone ID: TF_GmC948_2.pep
MFQESSVTRWPTQWTRYHDKLFERALLVVPEDLPDRWEKIADQVPGKSAVEVREHYEALVHDVFEIDSGRVEVPSYVDDSVAMPPSGGAGISTWDNANQISFGSKLKQQGENERKKGTPWTEEEHRLFLIGLSKFGKGDWRSISRNVVVTRTPTQVASHAQKYFLRQNSVKKERKRSSIHDITTVDSNSAPMPIDQTWVPPPGGSLQQSQQYPSSNMHDQMGTFGYSNYGFDM

SEQ ID NO: 31999 - protein, 132 aa, Glycine max
  Clone ID: TF_GmC74328_1.pep
MGRAPCCDKANVKRGPWSPEEDTKLKSYIEEHGTGGNWIALPQKIGLKRCGKSCRLRWLNYLRPNIKHGGFSEEEDNIICSLYVTIGSRWSIIAAQLPGRTDNDIKNYWNTKLKKKLLRKQKKEQQAQARKV

SEQ ID NO: 32000 - protein, 440 aa, Glycine max
  Clone ID: TF_GmC3745_1.pep
LEESTPIAGTTKARARRWTEEEDKLLSEKVKKHNGRNWKKIAAYLPGRTDVQCLHRWQKVLNPDLVKGSWTKKEDDRLIELVRKYGIKRWFFIAKYLPGRIGKQFGSRWHNHLDPTVKKDAWTEEEELILAYYYQIYGSKWAEIARILPGRTDNAIKNHWNCSMKKKLDASPLGCDIKVAPSGFCASGIRPEHVVAKVEGQSFNGMVSPKQSHWLNRSVDNILTKLILQNDSGEESCSASSRGTPTPRASRQFLDNSLDCLPLSSTVTDEAYESLKRQKVYFSDTELKVGDESDSPLLNLSYSKSANREKKGQAGNGGNYNSNNTMPHSVDEFSECLSPKTHMALACAYNNGCTPPTSILKNDTGDINPETLLRNLAMTYENVPSIIRKRTPKKASCCDRDQAPSRMIVNSPEAECVIGLDNLKLNRGFIPFLRRPNTQP

SEQ ID NO: 32001 - protein, 190 aa, Glycine max
  Clone ID: TF_GmC142751_1.pep
MGRAPCCDKNGLKKGPWTTEEDQKLIDYIQKHGYGNWRTLPKNAGLQRCGKSCRLRWTNYLRPDIKRGRFSFEEEETIIQLHSILGNKWSAIASRLPGRTDNEIKNYWNTHIRKRLLSMGIDPVTHSPRLAHVDISSTRSAALHGPSQRIFLWLLAMHQPMAPPQPPVRAAPRASTSRLLPLLPLAAPPP

SEQ ID NO: 32002 - protein, 97 aa, Glycine max
  Clone ID: TF_uC-gmflminsoy066h08b1.pep
GVLSYDPGVGRGPWTMEEDLIWITYIANHGEGVRDSLVKAGGLKHSGKRCRLRWLNYLRADVRRGNITLDEQLLIMGLHAEWGNRWFKIAKLVPGRT

SEQ ID NO: 32003 - protein, 274 aa, Glycine max
  Clone ID: TF_GmC1225_1.pep
MGRQPCCDKLGVKKGPWTAEEDKKLINFILTNGQCCWRAVPKLAGLKRCGKSCRLRWTNYLRPDLKRGLLTEAEEQLVIDLHADCCLRWSKIAARLPGRTDNEIKNHWNTHIKKKLLKIGIDPVTHEPLKKQAAASSQDSSSSPAEHLPQPGNNLDDQVKETEGILLNSEENSSSSQAENSSGDDSLLLDSICSDDSLLNSMWLDETPLVEALWDTTPNLENTSNNMGLLPSWEDNCAWLLDCQDFGIHDFGFTCFNEIESHALQTIGMKEEGH

SEQ ID NO: 32004 - protein, 373 aa, Glycine max
  Clone ID: TF_GmC148_1.pep
MGRAPCCSKVGLHKGPWTPKEDALLTKYIQAHGEGQWKSLPKKAGLLRCGKSCRLRWMNYLRPDIKRGNIAPEEDDLIIRMHSLLGNRWSLIAGRLPGRTDNEIKNYWNTHLSKKLKIQGTEDTDTHKQVQITMGRSPCCNKNGLKKGPWTPEEDDLIIRMHSLLGNRWSLIAGRLPGRTDNEIKNYWNTHLSKKLKIQGTEDTDTHKMLENPQEEAASDGGNNNKKKKKKKNGGKKNKQKNKGKENDEPPKTQVYLPKPIRVKAMYLQRTDSNTFTFDSNSASGSTSQEKEESPVTKESNVVSEVGNVGEESDGFGFFSEDHDLVNVSDIECHSYFPTDHGNLQQLYEEYFQLLNMDHGQFELNSFAESLLD

SEQ ID NO: 32005 - protein, 282 aa, Glycine max
  Clone ID: TF_GmC600_4.pep
YSLQLAEKMVQQEIRRGPWTEQEDYKLVYFVGMFGDRRWDFIAKVSGLNRTGKSCRLRWVNYLHPDLKRGKLTPQEQHLLTPQEEHLVMDLHSKWGNRWSRIARRLPGRTDNEIKNYWRTHMRKKKAQEKKHASAASPVSSSCQSSLSSNNHVVDSHASKEVGEESCYDTGGYDDGMMMGLIGGEKGYSMDDIWKDIMSEEENNIYNNNLQPVYEGHSEEGCNFSCPPPPMIMPSPPSWDQYNISSQPLWVMDEEESNKMLFPTLSDQYFPYYEQGNAFLTG

SEQ ID NO: 32006 - protein, 90 aa, Glycine max
  unsure (1)..(90): unsure at all Xaa locations
  Clone ID: TF_GmC1327_2.pep
MGRAPCCDKANVXKKGPWSPEEDAKLKSYIEQHGTGGNWIALPQKIGLKRCGKSCRLRWLNYLRPNIKHGGFSEEEDNIICSLYVSIGSR

SEQ ID NO: 32007 - protein, 236 aa, Glycine max
  Clone ID: TF_GmC341_2.pep
MDVKKGGSVVQAQVKLQKHNEKEMGMRKGPWAVEEDTILVNYIATHGEGHWNSVARCAGLRRSGKSCRLRWLNYLRPDVRRGNITLQEQILILDLHSRWGNRWSKIAQQLPGRTDNEIKNYWRTRVIKQAKQLKCDVNSKQFRDTLRYVWMPRLLERLQPTSQALEPNQSGLVLHASSSLLPSNSDHSIERGSDLWPGFNNQMLLEQGSGGDLLESLWDDDNMCFLQQLSYDLQMK

SEQ ID NO: 32008 - protein, 353 aa, Glycine max
  Clone ID: TF_GmC6838_1.pep
MGHHSCCNKQKVKRGLWSPEEDEKLINYITTYGHGCWSSVPKLAGLQRCGKSCRLRWINYLRPDLKRGSFTPQEAALIIELHSILGNRWAQIAKHLPGRTDNEVKNFWNSSIKKKLLSHDVVPSLATFSDHIHGPPNGSMESFFPLTDNPILNSHHHLDQLFLPIIPSPILQAFDHHHHNNDIKIDINKFFNNNANFLQYFQNPMPETVPPISNTTIPSLYEEDAWSSLGCVPIHLNPNQENQIMITKSDHTTPHLIVEKFINPSTWQQQQHSVEVEPPILPKVCESIEDYVCSIPYSSSVNSQDQHVEAVACFTPVICPQDQVEYIDALIMSSLPSSTTTSSSVVSFFQADK

SEQ ID NO: 32009 - protein, 67 aa, Glycine max
  Clone ID: TF_GmC175358_1.pep
IHCNWFYFVVVVINLPGLARCGKSCRLRWLNYLRPNLKRGNYTKEEEETIIKLHKLEKSYEIVNPIF

SEQ ID NO: 32010 - protein, 196 aa, Glycine max
  Clone ID: TF_GmC78832_3.pep
MMHAEKSPATLRSSDQERKKGVPWTEEEHRRFLMGLLKYGKGDWRNISRNFVVTKTPTQVASHAQKYYIRQKLSGGKDNKRRPSIHDITIVNLTSDQEKPLLFNDESHMTSEQQKLTSMPKVQLEWRINHHNNGGSNYDMFVSPNSSGISSKTLKLQGQDFYECAFHETYAKLKNTGFRTASRDFNKEAIFGIHAL

SEQ ID NO: 32011 - protein, 172 aa, Glycine max
  unsure (1)..(172): unsure at all Xaa locations
  Clone ID: TF_GmC73535_1.pep
MRRMKKDIEDEVLPNDMSGAQLNDESYEGSAGIVLKKGPWTSTEDDILVDYVKKHGEGNWNAVQKHTGLFRCGKSCRLRWANHLRPNLKKXGAFAAEEERLIAELHAKMGNKWARMAAHLPGRTDNEIKNYWNTRIKRRQRAGLPLYPPEVSLHALQESQHSQSTGGLKWWR

SEQ ID NO: 32012 - protein, 281 aa, Glycine max
  Clone ID: TF_GmC794_1.pep
MGRHSCCYKQKLRKGLWSPEEDEKLLRHITKYGHGCWSSVPKQAGLQRCGKSCRLRWINYLRPDLKRGTFSQEEENLIIELHAVLGNRWSQIAAQLPGRTDNEIKNLWNSCLKKKLRQKGIDPVTHKPLSEVENGEKAAEVSNELNLLKSESSKSDSASYEQRTSISPKAYAPEMDGSCSSKIEINFVTNNNCYNKDLFLDRFMSSSRQESYTTSCQPSDLMGNFPIQMSYATNDHCLPNDSNSSHWFSQTGRSFDMNTDVSFQCRCHFYQSYTYNQLVSS

SEQ ID NO: 32013 - protein, 154 aa, Glycine max
  unsure (1)..(154): unsure at all Xaa locations
  Clone ID: TF_jC-gmXLIB3563P066cf08a1.pep
GRSPCSDDNGLXKGPWTPEEDHKLVQPIQKHGPGSRRALPKIAGLNKCGIRCGLRGTNYLRPDIKKGKFFQEEEQTMLHLHSILGNKRAAIASHLPCRTDHEIXNFWNTPFMKKLIXQMGFDSMTHQPTTDLVCTLTHLVALGNITDLMGHFTL

SEQ ID NO: 32014 - protein, 429 aa, Glycine max
  Clone ID: TF_GmC567_1.pep
MGRHSCCYKQKLRKGLWSPEEDEKLLNHITKHGHGCWSSVPKLAGLQRCGKSCRLRWINYLRPDLKRGAFSQQEENMIVELHAVLGNRWSQIAAQLPGRTDNEIKNLWNSCLKKKLRQRGIDPTTHKPLSEVENDKDMNMMPPSTDKSTQKASVGSNEVVSNLVDHHQPPKTMPNSSSERYPLEVSTTSSTQELFLDRFGTTPTTCHENNNNTSDLVGSYFSFQHLNYGTTTSMALSSNPNTSLCFILPSTSSDINNNNSIITSSSMLPSIFPTQHVKLQSNNNNPSSISSDGVQNWETSNNTNKNNGNMQLQSSTNYLDSTWGVAESMKIVNINKEAHVVPLQAEQEDLKWSEYLYTNTPFILGNNTAQNHQIHTSQSIYSEVKPETGFITDESCATWHHYQNQTPALLSDIYSKDLQRFSVTFGQTL

SEQ ID NO: 32015 - protein, 234 aa, Glycine max
  Clone ID: TF_GmC1102_1.pep
MVRAPYFDKNGIKKGAWSEEEDKRLMAYVERHGHPNWRQLPKFAGLQRCGKSCRLRWMNYLRPNLKRGNYTQKEEQIIKDLHKKHGNKWSLIAENLPGRTDNEIKNYWHSNLKKFLKGNENTPCDDDDELKSTECKEFERSMNKAHSADSHHILESSVSISSETSYTEGNSPSFSSSHTTESSTLSKEEDSVVSWQTMDVLSSNFWTEPFISENALNQDYFPISSYGTEPFFLW

SEQ ID NO: 32016 - protein, 301 aa, Glycine max
  Clone ID: TF_GmC5525_1.pep
MGRSPCCEKEHTNKGAWTKEEDERLINYIKLHGEGCWRSLPKAAGLLRCGKSCRLRWINYLRPDLKRGNFTEEEDELIINLHSLLGNKWSLIAARLPGRTDNEIKNYWNTHIKRKLYSRGIDPQTHRPLNAASATPATTVTATAVPSSNSKKKIKNNNNNNNGFQLVNNSAYANTKIGTDMIAAEDSNSSSGVTTEESFPHHQLNLDLSIGLPSQPQVSSSLNPEKLKPEPQEHDDQKPQVLYQLYGKNITGQQGVCLCYNLGLQSNQACYCKTMGTSTTTVTTTTATDRNLYRFYRPMNI

SEQ ID NO: 32017 - protein, 75 aa, Glycine max
  Clone ID: TF_GmC16783_2.pep
MADSDRSSSEVSTHSTDSGKRGSSKVEFSEDEETLIIRMYKLVGERWSLIAGRIPGRTAEEIEKYWTSRFSGSSE

SEQ ID NO: 32018 - protein, 114 aa, Glycine max
  Clone ID: TF_GmC100_2.pep
MRKPEVSGKNNNINNKLRKGLWSPEEDDKLMNYMLNSGQGCWSDVARNAGLQRCGKSCRLRWINYLRPDLKRGAFSPQEEEIIIHLHSLLGNRYNILYTLLFYLHMHVFITIFV

SEQ ID NO: 32019 - protein, 288 aa, Glycine max
  Clone ID: TF_GmC1274_2.pep
MPLSSSSSSAVDSAVSGEIMLFGVRVVVDSMRKSVSMNNLSQYELPRDAANAKDDAAGYASADDAAPINSDKNRDRKRGIPWTEEEHKLFLVGLQKVGKGDWRGISRNYVKTRTPTQVASHAQKYFLRRTNLNRRRRRSSLFDITTDSVSTTPMEEGVQIQHQDNVSLFHPVYPVTPEGSNMNGFPKMSMYPKDVGSGVMSVQAGNPMETLTLGQGNVEKHNVPSTANKASTVSGIITPGSSSSAIDPPPTLSLGLSFSSDQRQTSSRHSALHAMQCFSNGDSIISVA

SEQ ID NO: 32020 - protein, 174 aa, Glycine max
  Clone ID: TF_jC-gmst024169f06b1.pep
TRPERTTRSGHSRTLGSPPLRLSMVSASAPPPQAQSDAAGSGEEVSKKVRKPYTITKSRESWTEQEHDKFLEALQLFDRDWKKIEAFVGSKTVIQIRSHAQKYLLKVQKNGTSEHVPPPRPKRKAAHPYPQKASKNGHIFVISEEKMSQDKKAVAETKLTEEEKLLEEKIAGFG

SEQ ID NO: 32021 - protein, 585 aa, Glycine max
  Clone ID: TF_GmC1050_1.pep
TDEDLHLYGTNTYHDESHPVEARNLSAELNESKEINWTEVDLEDANVTSGACQINIDSKQGCDGSEVFLCGSNKSGSVGERADIIMSDSTEVENDKANKLGGAATELISAPNTREPCQSNSIAEDRMVVSEVSSGGLGNELERHRVSSTLCVDDRDNKHEADSGVIVDMKSSVHDLSTMINSSISSLGNSCSGLSFSSENKHVPLGNPRVSALSMDNLHALLQNTVAVDVQCEKTASQDQMSSTCDIRGGRDMHCQNSISNADHQHITGNLSDHVDAVSILQGYPLQVPVKKEMDSDMNCTSSATELPFLPHKIEQDDDHIKTFQSSDSDKTSRNGDVKLFGKILTNPSTTQKPNVGAKGSEENGTHHPKLSSKSSNPKITGHHSADGNLKILKFDHNDYVGLENVPMRSYGYWDGNRIQTGLSTLPDSAILLAKYPAAFSNYLTSSAKLEQPSLQTYSKNNERLLNGASTFTTRDINGSNALIDYQMFRRDGPKVQPFMVDVKHCQDVFSEMQRRNGFEAISSLQQQSRGMNGVGRPGILVGGSCSGVSDPVAAIKMHYSNSDKYGGQTGSIAREDESWGGKGD

SEQ ID NO: 32022 - protein, 318 aa, Glycine max
  Clone ID: TF_GmC934_1.pep
TRRTPSCDKSGMRKGTWTLEEDRKLIAYVTRYGSWNWRQLPRFAGLARCGKSCRLRWIEYLRPDVKRGNFTQQEEEFIIRMHKKLGNRWSTIAAELPGRTDNEIKNHWHTTLKKRSQQNTLTKEEARASKSKDKVLPNKGVTVTLPATSSQISDNSSLSPASSTSSEFSNITSDPSTAASMQNLVFEDDDEFGFLDSYIDPMNNESFWKELTLDDISFNNVPIVSEDTNGCFQSTSSSNSNTLDSLHKSTSESIVADNDFGGFFDAYAEATVDNFWTQPYVAGMSSHVPTELLAPSVAESEYFTPIYDDLWGQTHLYY

SEQ ID NO: 32023 - protein, 395 aa, Glycine max
  Clone ID: TF_GmC156_2.pep
FSCLCWTFLDFGIRIQKQRERWTDEEHKKFLEALKLYGRAWRRIEEHVGTKTAVQIRSHAQKFFSKILRESSGNSTTLEESIEIPPPRPKRKPIHPYPRKLVEFPKTGISNSEHPLRSNSLKSSDFGQENNSPKSVLSTVVSETVGSSDSDTSSRCLSPASSISGVPTNRFPLAEPKTSFKEEGSAPSSAHDEQPPVKLEFFHKESVSTRDDATEESSGRTLKLFGTTLLVTDTCKPSSPTTEPCKPTPAAAMYLMQLQNVCSDVTEGHASIVPWWTLPHNTPFMPLHKEPKGKHLYSNLGEFEHKEVQKEGSWTGSNTSSIDDGDNTEKSDDQAKSHVHGFSKSETLTISELRVRPKTCGKGFVPYKRCMAERENQCSSVYYEEREEQRIKLSL

SEQ ID NO: 32024 - protein, 216 aa, Glycine max
  Clone ID: TF_LIB5118-056-A1-PF1-A5.pep
MPPSKRSKHRRMGSNTSTEEKSDFEARMKIPAELVKGPWKKQEDELLASLVEEHGPKDWSKIANKMAQLGHVRMGKQCRERWFNHLSPEVRKESWTAEEDRVIIESHRQLGNKWTAISRLLNGRPANAIKNHWNSTLKRQVQFGAEIGSGSPRPGKRQRATVGHQPRKKRRLDVSSYESDEDFDSTSDEMDDDDSELVTYESRNEDQEDQRTFATS

SEQ ID NO: 32025 - protein, 350 aa, Glycine max
  Clone ID: TF_GmC1121_1.pep
MEPEETAAAADGSFDEGLLGLDDGGGGGRDRVKGPWSPEEDAILSRLVGKFGARNWSLIARGISGRSGKSCRLRWCNQLDPAVKRKPFTDEEDRMIVAAHAIHGNKWAAIARLLPGRTDNAIKNHWNSTLRRRGVGHDTIKLESVSFMEDVSLEKAKASSEDTLSCGDVSLKSSEGRDVSSMEIMDDKSDDKAQTEGQIHHEVKDLPTLFRPVARVSAFNVYHSFDGTQPSTSIKRPVPMQGAVLQSSKPDMEFCRMLEGICGDQSVPHQCGHGCCAAPDGRKSESSLLGPEFVEFSEPPSFPNFELAAIATDISNLAWLKSGLESSSAKMMGNTSGRVVSNGSQVHIGH

SEQ ID NO: 32026 - protein, 163 aa, Glycine max
  Clone ID: TF_jC-gmXLIB3563P057bh11a1.pep
MSSCITSSVDPVEGNRDRKFLKVNPLCKPPMTPDVTQDVDDETCSDESCGEMDPTDWTDDEKTAFLQAVSSFGKDFAKIARCVGTRSQEQCKVFFSKGRKCLGLDLMRPIPENVGSPVNDDANGGESDTDDACVVETGSVVGTDKSGTKTDEDLPLYGTNTYH

SEQ ID NO: 32027 - protein, 226 aa, Glycine max
  Clone ID: TF_GmC139_1.pep
MGGVAWTEEEDHLLKKCIQQYGEGKWHRVPLLAGLNRCRKSCRLRWLNYLRPNIKRGNFAEEEVEMIIKLHKLLGNRWSLIAGRLPGRTANDVKNYWNCHLSKKLNVIEAEDRPITRDVQVIRPQPRNIVGSSSVKRRGQNESPTDKGVQQESSMSSLTFDTADGQNHMLDSQQDNNIYACLDQQGIVSELSMDFQFEGFGAMMNGEGSSSQWDWGDLLLDMDLYK

SEQ ID NO: 32028 - protein, 84 aa, Glycine max
  Clone ID: TF_GmC130538_1.pep
MGRHSCCLKQKLRKGLWSPEEDEKLFNYITRFGVGCWSSVPKQAGLQRCGKSCRLRWINYLRPDLKRGIISPLFSLLIISLHEV

SEQ ID NO: 32029 - protein, 138 aa, Glycine max
  unsure (1)..(138): unsure at all Xaa locations
  Clone ID: TF_LIB4199-010-Q1-K1-A5.pep
MVQDMKQQDNGESKKKERHIVTWTQQEDDILREEIGIHGTENWAIIASKFKDKTTRQCRRRWYTYLNSDFKKGGWSAEEDILLCEAQKIFGNRWTEIAKVVSGRTDNAVKNRFFTLCRKKTKYEALAXENSTSYIKFN

SEQ ID NO: 32030 - protein, 575 aa, Glycine max
  Clone ID: TF_GmC1645_1.pep
GSPNARVSSANKNSTSISVPLRNSCALREFIPSVKEVITRDETNESFVTDELENQKLEIDDGKHTQKTNDTCEVSKLENSGASELVQTEKTDGRNCALTIDGVPGNQNYPRHVPVHVVDGNLGTSTQNLSPDMVFQDSIFQPKGGVNRQPNLVTNSATSHISECQNNAARSSIHQSFPPSPPFAQDDYHSFLHMSSTFSSLIVSTLLQNPAAHAAASFAATFWPYANAETSADSPVCTPDFPSRQIGSPPSVTAIAAATVAAATAWWAAHGLLPLCGPLHTAFACPPASATTVPSMIIDESPQKTERGEIKPQNPPLQDQIPDPEHSEAQHSAPKSPAVSSSKSEDRGDANLDTSPKATNHEMNQAISENPDSNKMKGRKPVDRSSCGSNTTSSSEETELLEKDEKEKEEPKTPDANVLDTELSNRRSRSINNLTDSWKEVSEEGRLAFQALFSREVLPQSFSPTHHLINKDNQIDSIKDNELNTDYKDEDLESKKCSSICDGVQKNLLFVKDNNEEEGLLTIGLGPGKLKTRRTGFKPYKRCSVEANENRIGTACIQGEEKGPKRLRLNGEAST

SEQ ID NO: 32031 - protein, 259 aa, Glycine max
  unsure (1)..(259): unsure at all Xaa locations
  Clone ID: TF_GmC184_1.pep
MYYEDMAGNVGWGVIEEEGWRKGPWTSEEDRLLILYVKXHGEGRWNSAARLAGLKRNGKSCKLRWVNYLRPHLKKGQITNSARGIIQELHARWGNRWSTIARSLPGRTDNEIKNYWRTHFKKKMKTPSDAAEKARIHSSRRQHFQQQQQQLKQQQQQFQFNLDMKGIINLLEENDHRVPSISQEAQEMASMYPNTSEHQGYFYSIFNVNDNDNNVSAPESSNEEILWDGLWNLDDVLCNFNAASATSKASLHNLVSPFC

SEQ ID NO: 32032 - protein, 267 aa, Glycine max
  unsure (1)..(267): unsure at all Xaa locations
  Clone ID: TF_GmC1130_2.pep
MNSSTNTSNSQSMAAAASDGSGKKVRKPYTITKSRESWTEEEHDKFLEALQLFDRDWKKIEDFVGSKTVIQIRSHAQKYFLKVQKNGTVAHVPPPRPKRKAAHPYPQKASKNVLVPLPASVGYASSRNTLAPGFASWDETSLLMNAGADKPMTXYDCQDELNVQFGSRADIGSKGITQITNSSLSGVGNSTRTLLTSEIPKQGKQAPVLHGLPDFAEVYGFIGSVFDPETNDHVQKLKEMDPINFETVLLLMRNLTVNLSSPDFEPI

SEQ ID NO: 32033 - protein, 97 aa, Glycine max
  Clone ID: TF_GmC1130_3.pep
MNSTTNTSNSQSMAAAAPSDGSGKKVRKPYTITKSRESWTEEEHDKFLEALQLFDRDWKKIEDFVGSKTVIQIRSHAQKYFLKVQKNGTVAHVPPPR

SEQ ID NO: 32034 - protein, 157 aa, Glycine max
  Clone ID: TF_GmC6850_6.pep
GLQEDDILREQIGVHGTENWAIIASKFKDKTTRQCRRRWYTYLNSDFKKGGWSPEEDMLLCEAQKIFGNRWTEIAKVVSGRTDNAVKNRFCTLCKKRAKYEALVKENSTSYINSNNKRIFLQHGCDTNVASETAIKKMRRSHIPDAAEKINFGRQIT

SEQ ID NO: 32035 - protein, 336 aa, Glycine max
  Clone ID: TF_GmC192_4.pep
MGRQPCCDKVGLKKGPWTAEEDKKLISFILTNGQCCWRAVPKLAGLLRCGKSCRLRWTNYLRPDLKRGLLSEYEEKMVIDLHAQLGNRWSKIASHLPGRTDNEIKNHWNTHIKKKLKKMGIDPATHKPLPNANEQNQNQTRQDQQLHHQPVELEEPNQQPLQVDFDPKVDPNKEPEKPETSLESSTITEEAKEEDQIITPLFDTMELMNGFCTDEVPIIEPHEILMPCAPSSSSTTSSSSSSNSTNFLEDLQLPDFEWSCNYNDNNTITNNNNNEDKDDDNNNNSSMALWDDDIIGNRYWLINEDDDSDENQVFDASLTQFSKMFMESESWGYGLF

SEQ ID NO: 32036 - protein, 133 aa, Glycine max
  Clone ID: TF_GmC482_2.pep
LLSEKLEDTYSLTSLAITSIIAAHARYGNRWATIARLLPGRTDNAVKNHWNSTLKRRAKGINVNVNDADNEDDPLTALTLAPPGIANATLTEDAVPDHRASPESAAEGFWDMMRDVIAREVREYVSSNFSDNN

SEQ ID NO: 32037 - protein, 299 aa, Glycine max
  unsure (1)..(299): unsure at all Xaa locations
  Clone ID: TF_GmC563_2.pep
MNRGIEVLSPASYLQNSNWLFQESKEARWTAEENKLFENALAYYDKDTPDRWMRVAAMIPGKTVGDVIKQYRELEEDVSVIEAGLIPVPGYTTASSFTLEWVNNQGYDEFKQFCNVGAKRGASTRPTEQERKKGVPWTEEEHRQFLLGLKKYGKGDWRNISRNFVTTRTPTQVASHAQKYFIRQLTGGKDKRRSSIHDITMVNLQETKSPSSDTTKPSSPLQNQALSSMVKEEYEWKLPCEGMPIVFNSTSGNMFMSAPLHGISSYESRPQEQNLLRXLHGCQFSPCDAILQMQLMRHR

SEQ ID NO: 32038 - protein, 173 aa, Glycine max
  Clone ID: TF_GmC1779_1.pep
MTGGHDRVKGSWSPQEDATLLKLVNEHGARNWSVISAGISGRSGKSCRLRWCNQLSPEVQHRPFTPAEDKMIIKAHAIHGNKWATISRLLPGRTDNAIKNHWNSTLRRRRAVESSSSSSASPPAKRHSSLFDTLHPFKKQCIEKENEEERVLSPVTTSLSLLEREPRLSTACH

SEQ ID NO: 32039 - protein, 337 aa, Glycine max
  Clone ID: TF_GmC78832_1.pep
MEFETSYPTCFMSNSSWFSQESQFTEWTREENKKFESALAIYDKDTPDRWLRVAAMLPGKTVYDVIKQYRELEEDVCEIEAGRIPVPGYPTSSLTLKMVDNQCYDACRKKPATLRSSDQERKKGVPWTEEEHRRFLMGLLKYGKGDWRNISRNFVVTKTPTQVASHAQKYYIRQKLSGGKDNKRRPSIHDITIVNLTSDQEKPLLLNDESHMTFEQQKLTSMPKVQLEWINHHDNGSRMVVNPNYDMFMSPSSGISSKTLKLQGQDFYECAFHETYAKLKNSGFRTTSRDFNKEVRQLFNMSISLYRLNLHHRMRHSGILSLGQRDNIQYSCTLILL

SEQ ID NO: 32040 - protein, 213 aa, Glycine max
  Clone ID: TF_GmC1768_2.pep
MGRAPCCEKMGLKRGPWTPEEDQILINYINTYGHANWRALPKLAGLLRCGKSCRLRWINYLRPDIKRGNFTREEEDTIISLHEMLGNRWSAIAARLSGRTDNEIKNVWHTHLKKRLPQNYQQSHHTKKRSKKQPPKLDADASKSNQDAKLEQQDPVNIHGSNSEDMMMPLSPPHCSSDMSSSLTTSDNNSNVNIINNNHDMSLNVNDYDIDTE

SEQ ID NO: 32041 - protein, 196 aa, Glycine max
  Clone ID: TF_GmC1321_2.pep
MDEKGARSSNTLLSCEDEMDLRRGPWTVDEDLTLINYIATHGEGRWNTLALSAGLKRTGKSCRLRWLNYLRPDVRRGNITLEEQLLILELHSRWGNRWSKIAQYLPGRTDNEIKNYWRTRVQKHAKQLKCDVNSKQFKDAMRYLWMPRLVERIQAAATAHHHRNCCGFSNGICRCYHNHHHQQQHHHIQLLRQQQP

SEQ ID NO: 32042 - protein, 393 aa, Glycine max
  Clone ID: TF_GmC988651_1.pep
MFGFSQQHNNVDNNGGTSSLSDDEDDLTRFFDYDTAPGQNLDELFAPSIVTQLPPMLPAEATQHHHTLPQHVNQIVSSSPVDLPSHVPIEALVQQNGGSSVQRQRGKGLQWTVEEHMKFLVALDEVGKGDWITISKHIGTKSSTQVASHAQKYYLRQKAKKKIRKSIHDITLNTISHQDDTQNSTPHPDPEIQPVHEIHQMQEMPPNSMTHQMSGFEYFANQQVHEIQQMQDILSVYPSNNITHQMGGFEHFVNQQVHEMPVYPPNNMTHQMSGFEHFANQQVHEMQQMQDILSMYPSNNMIHQMNGSEYFVNQQVHEMPVHPPNNMTHQMSGFQYLANQQVHKIQQMQDILPAYPSNNMTHQMSGFECSNKDFGRGCYKPEYPPNNTSSSNN

SEQ ID NO: 32043 - protein, 355 aa, Glycine max
  Clone ID: TF_GmC1310_1.pep
MGRAPCCDKSNVKKGPWSPDEDAKLKSYIEQHGTGGNWIALPQKIGLKRCGKSCRLRWLNYLRPNIRHGGFSEEEDNIICSLYVSIGSRWSVIAAQLPGRTDNDIKNYWNTRLKKKLLGKHRKELQARNKGNGGILKQENSSSLLLQQNSAQQLHPCWPQIPVLPLSSPYTNQSPSFNDQDSIRKLLIKLGGRFSDDYQPILDGLNLQFPHGSNSLSSTQQIQEEQVHVGSSALGCMNSIGHNQVQFGQSNEYCAELVQGQGSFITTAIGEMVSSNDYSRRLLGGSLEFFYGEEMITDNKIMGACASSSCGQSTNWGETSSSLMYPSLVASNYEGVRQEMPRECAFQELSYPGAQ

SEQ ID NO: 32044 - protein, 341 aa, Glycine max
  Clone ID: TF_GmC691_1.pep
MRKPYMMEKDKMNNNIKSKLRKGLWSPEEDEKLLRYMITKGQGCWSDIARNAGLQRCGKSCRLRWINYLRPDLKRGAFSPQEEELIIHLHSILGNRWSQIAARLPGRTDNEIKNFWNSTLKKRLKMNNNINATSSPNNSYSSSEPRDVNVMGGIMPMNEHDLMTMCMDSSSSTSSSCMQSMHTTNRAVTDQFDPFPLLSNNRYDMTGATDFLDNMAACLTQVGMVDHDHGVVHDGYGTLEPNKTGLESDFSLPPLESRSIDDNSSTPIDHVKSHNNNNHFKNSCFNNTDHHHHIQCSNNVVVEDLFGFGNHGHGESFRMEEWDFEGLIQDIPYFSSLDFQV

SEQ ID NO: 32045 - protein, 307 aa, Glycine max
  Clone ID: TF_GmC3823_1.pep
MGRSPCCSKEGLNRGAWTAHEDKILREYIRVHGEGRWRNLPKRAGLKRCGKSCRLRWLNYLRPDIKRGNISPDEEELIIRLHKLLGNRWSLIAGRLPGRTDNEIKNYWNTNLGKKVKDGHQTTTGNNTQNPMPNPSPSLSPPKLDSHVVRTKATKCSKLLFLNPPPHPSMQNKFKTEAEEEEEEARLVNGVIRNQMEHTTYDNGFLSFPDEEKELSTDLLIDFNVGDFCLSDFLNSDFSNSYNFSCNINNVNNHEQLSPCSDQPDPMFSDEVLKDWTHSNFADEANASNNLRSFISFLESTEERLGE

SEQ ID NO: 32046 - protein, 305 aa, Glycine max
  unsure (1)..(305): unsure at all Xaa locations
  Clone ID: TF_GmC508_1.pep
MMAVARKEMDRIKGPWSPEEDEALQKLVERHGPRNWSLISRSIPGRSGKSCRLRWCNQLSPQVEHRAFTPEEDETIIRAHARFGNKWATIARLLSGRTDNAIKNHWNSTLKRKCASFMTADEAAAGGFSPRPLKRSFSAGTAVPPPGSPSGSDVSESSAAPGVXLSLSLPSQVFRPVPVRPVVETASSQDDADADAEDAGPTTSLSLSLPGVESSEISNRTSTVPVMPVHTVAAAAPVPLPAPEVGLGALNLNAEFMAVMHEMIRKEVRSYMEQQNGMMCFQGMEMMEGFRNVSVKRIGISRVDS

SEQ ID NO: 32047 - protein, 295 aa, Glycine max
  Clone ID: TF_GmC508_2.pep
MIAVARKDMDRIKGPWSPEEDEALQKLVERHGPRNWSLISRSIPGRSGKSCRLRWCNQLSPQVEHRAFTPEEDETIIRAHARFGNKWATIARLLSGRTDNAIKNHWNSTLKRKCASFMMAGDEAVAVSPRPLKRSFSAGAAVPPPGSPSGSDFSESSAPGVVSVSPSHVFRPVPVRPIVETASSQDDADDAGPATSLSLSLPGVESAEISNRATTVPVMPVNTVAAPAPVPAEVGLGALNLSGEFMAVMHEMIRKEVRSYMEQQKNGMMCFQGMEMMEGFRNVSVKRIGISRVDS

SEQ ID NO: 32048 - protein, 124 aa, Glycine max
  Clone ID: TF_10237307.pep
MGRPPCCDKIGIKKGPWTPEEDIILVSYIQEHGPGNWRSVPSNTGLMRCSKSCRLRWTNYLRPGIKRGNFTDHEEKMIIHLQALLGNRWAAITSYLPQRTDNDIKNYWNTHLKKKLKKMQNWRW

SEQ ID NO: 32049 - protein, 208 aa, Glycine max
  unsure (1)..(208): unsure at all Xaa locations
  Clone ID: TF_GmC90208_1.pep
MAPTRKSRSVNKRMSSSNDNSPERDGINSNKNKLRKKKLTDKLGSQWSKEELERFYEAYRKYGKDWKKVAAFIRNRSTEMVEALYNMNRAYLSLPEGTASVVGLIAMMTDHYNVMEGSDSERESNDAPGSQKPVKRKHEEVQLSVSKDQSHSIASRDDCLSILKKRRXDGMQLKPYAVGKRTPRXPVYKKDDTEXYVSPYRRKPEVDY

SEQ ID NO: 32050 - protein, 324 aa, Glycine max
  Clone ID: TF_GmC1813_1.pep
MVRTPSCDKSGMRKGTWTPEEDMKLIAYVTRYGCWNWRQLPKFAGLARCGKSCRLRWMNYLRPNIKRGNFTQQEEECIIRMHKKLGNRWSAIAVELPGRTDNEIKNHWHTALKKRSQQNTLINEETKAIKSKNKESVHNNGVFVTLLATSQISDNSSLSPVSSTCSEFSSITSDLSTAASCMENLVFEDDDLGFLDLYNIDPMNGNLWTELNLDGISFNTPCEIVSGDTNSTFQSSSSSNSNTLDSPHQSTSESIVVNNDFGRFLDSYEEATVDNFWTQSYVADMSHVPSELFVPSVAESEYFTPLYDDLWGQTHLYHENHCLF

SEQ ID NO: 32051 - protein, 146 aa, Glycine max
  Clone ID: TF_GmC148_3.pep
MGRAPCCSKVGLHKGPWTPKEDALLTKYIQAHGEGQWKSLPKKAGLLRCGKSCRLRWMNYLRPDIKRGNIAPEEDDLIIRMHSLLGNRWSLIAGRLPGRTDNEIKNYWNTHLSKKLKIQGTEDTDTHKMLENPQEEAASDGGNNNN

SEQ ID NO: 32052 - protein, 50 aa, Glycine max
  Clone ID: TF_GmC143158_1.pep
MCSRGHWRPAEDEKLRELVERYGPHNWNAIAEKLRGRSGKSCKLRWFNQL

SEQ ID NO: 32053 - protein, 118 aa, Glycine max
  unsure (1)..(118): unsure at all Xaa locations
  Clone ID: TF_jC-gmfl02220131d02a1.pep
MGKSPCDSSHDPXVRKGPWIMVDDLFLINYLADHGECVWNSPAEACGLKRTXKSCRLRLLNYLCPDVRXDTLHPEXQLLIIELHTXWGYTWSKIAKDLPXRTDCVIKCFWRPRIQKPI

SEQ ID NO: 32054 - protein, 307 aa, Glycine max
  Clone ID: TF_GmC274_1.pep
MKWESITLSSPTSCTPNSNTNWLVENNSRSTKWTPEENKLFENALAVHDKDTPDRWHKVAEMIPGKTVVDVIRQYKELEVDVSNIEAGLIPVPGYSSTAISPFTLDWVNTPGYDGFKGCGKRPSSVRPIEHERKKGVPWTEEEHKLFLLGLKKYGKGDWRNISRNFVITRTPTQVASHAQKYFIRQLSGGKDKRRASIHDITTVNLTETITTSCSEDTNRSTSPHVLSQPQQQNSTPTTPRTHFQWTNQSNTGVAMTLNPAHERVFMSPYGANSFGVKIEGQNLHESSYLGPQTQNMVFQMQQSSQH

SEQ ID NO: 32055 - protein, 152 aa, Glycine max
  unsure (1)..(152): unsure at all Xaa locations
  Clone ID: TF_LIB4392-025-R1-K1-C11.pep
MAEVVKSEDCCQENKQSTAASCSSVSEGSGSAXLMSPAICSPASTSPSHRRTTGPIRRAKGGWTAXEDETLRNAVAVFKGKSWKKIAEFFPDRSEVQCLHRWQKVLNPELVKGPWTQEEDDKIVELVSKYGPTKWSLIAKSLPGRIGKQCRE

SEQ ID NO: 32056 - protein, 172 aa, Glycine max
  Clone ID: TF_GmC8312_1.pep
MGRSPCCDKVGLKKGPWTPEEDQKLLAYIEEHGHGSWRALPAKAGLQRCGKSCRLRWTNYLRPDIKRGKFSMQEEQTIIQLHALLGNRWSSIATHLPKRTDNEIKNYWNTHLKKRLDKMGIDPVTHKPKNDALLSTEGPSKIAANISHMAQWESARLEAKARLRRESNLRSS

SEQ ID NO: 32057 - protein, 182 aa, Glycine max
  unsure (1)..(182): unsure at all Xaa locations
  Clone ID: TF_17400850.pep
KRGNFTEHEEKMIIHLQALLGNRWAAIASYLPQRTDNDIKNYWNTHLKKKLKQSGSDEGVDQEGHSSSSSSNSHPKGQWERRLQTDIQMAKKALCDALSLHKPATATATNLVVPDDATKPSSTSHQPYKHASSSYASSYENISRXMENWMKSPNSNSTNNSPGYYSSSFSNMVNNNTTTGSS

SEQ ID NO: 32058 - protein, 337 aa, Glycine max
  Clone ID: TF_GmC1413_1.pep
MGRPPCCDKGVKKGPWTPEEDIILVSYIQEHGPGNWKAVPANTGLSRCSKSCRLRWTNYLRPGIKRGNFTDQEEKMIIHLQALLGNRWAAIAAYLPQRTDNDIKNYWNTYLKKKLNKKLEAGSDQGSLLGGGHNNIGFSSVSQPMSRGQWERRLQTDIHMAKKALSEALSPNKASSSSSTLLAESNSNLSNENSTFYNSNTNKPTTTQSMCYASSADNIARLLKGWMKNTPKSASCAASAVTQNSCSSSEGITTTKGSTTSTSTVELSETFESLFGYESFDNYSSNSEFSPSLSPEATLFQDEGKPDITTGLIDMPFSLLEKWLLDVDAGSQEKLGF

SEQ ID NO: 32059 - protein, 276 aa, Glycine max
  unsure (1)..(276): unsure at all Xaa locations
  Clone ID: TF_GmC1768_1.pep
MGRAPCCEKMGLKRGPWTPEEDQILINYINTYGHANWRALPKLAGLLRCGKSCRLRWINXSCDNYTIACRWSAIAARLPGRTDNEIKNVWHTHLKKRLXKIINKATTRKKRSKKQPKLDVDASKSNQDAKLEQQQEPVNNNFPFHASNSEDMMPLSPPQCSSHMSSSSLTTSDNNGSINNNHDMSLNVNDDIDTPETDAGVDEDFWSEVLSSDNSGETTSGFPTIDYDHQFLPMSPLMTEEGVLIDASSSSVCDDGMDFWCNVYARAEEFTQLLEL

SEQ ID NO: 32060 - protein, 269 aa, Glycine max
  Clone ID: TF_GmC1466_1.pep
MGRRPCCPKEINKGAWSREEDETLSKYVSIHGEGKWQKVAQNAGLKRCGKSCRQRWLNYLKPGIKRGHISVDEEDMIIRLHRLLGNRWALIAKRLPGRTDNEIKNYWNTNLSKKLQKHPTSSVSSLQHKRHEKEKTIQMHVSPEAPRPRRVNAVEYSKNLENGGCGNRPSTTPSPSNKVEGSSEEASFSDFLIHDIDQNQFLIADDSNSKVPQMEEDHPHNNKVELITNNSPSSSSPSDHCHHLLPEKFDPFETLLDVELASFLGFEND

SEQ ID NO: 32061 - protein, 331 aa, Glycine max
  Clone ID: TF_GmC146_2.pep
GRPPCCDKEGVKKGPWTPEEDIILVSYIQEHGPGNWRAVPAKTGLSRCSKSCRLRWTNYLRPGIKRGNFTEQEEKMIIHLQDLLGNRWAAIASYLPQRTDNDIKNYWNTHLRKKLKKMQAGCEGGSFGEGFSASRQIPRGQWERRLQTDIQMAKRALSEALSPEKKPSCLSASNSNPSDSSSSFSSTKPTTTQSVCYASSADNIARMLKGWMKNPPKSSRTNSSMTQNSFNNLAGADTACSSGAKGPLSSAELSENNFESLFDFDQSLESSNSDQFSQSLSPEATVLQDESKPDINIAAEIMPFSLLEKWLLDEAGCQEKLVGCCGDAKFF

SEQ ID NO: 32062 - protein, 329 aa, Glycine max
  Clone ID: TF_GmC1321_1.pep
MEVKGIRASNSTTTTTIQSEDEMDLRRGPWTVDEDLALINYIANHGEGRWNSLARSAGLKRTGKSCRLRWLNYLRPDVRRGNITLEEQLFILELHCRWGNRWSKIAQYLPGRTDNEIKNYWRTRVQKHAKQLKCDVNSKQFKDTMRYIWMPRLVERIQATAAASATTTVTATTATNNAYTYGSNLNNNKFEVHDHKGKMGLTDPSVMNNDLVGSHVTQSYTPENSSTGASSSDSFGTQVSAISDLTEYYTVTVSGNNNNTNSADYYQPSQISYSDSCITSPSGLFPQGLDFQSMDPNTPWNMQSGDSSDSFWNVESMLFLEQQLMNDNM

SEQ ID NO: 32063 - protein, 679 aa, Glycine max
  unsure (1)..(679): unsure at all Xaa locations
  Clone ID: TF_GmC1272_1.pep
RFGSGMSSLDFILMEPAEVAGVNGGKWTDQETLLLLEALELYKENWNEIAEHVGTKTKAQCILHFVQMPIEDTFVDCDDDVDAGCKETADPVATKSDSSMDKDASECIENHTSDGIKDSEKTSKAEDLEVKVNEKETPKLQEGSDEKASEETSKSEDAVKVKIDQEADNDCAINALKXSICFFWFSPGPEGPSSFADVGNPVMALATFLAHLVGSDAAVASAHSSIKSMTRNSPGTELAARCCFLLEDPPDSKKEPTSSERDSKSEGDQDEVNVNQDKSTLEDKDLPNDHNNKKIESNALEDKGKPASTDDGALEKPISSKEQAVVNNECGLDKGHDLNNAKLPNDQAPGTLHNSGGSTSKAEIPPSSDKAQEETLIEEPCPSVKDKHVSDSLLSDKSKDAEMVSNAIPSTKSKPQNPESTNPAHESLETTDSVMDVDGVSNSLPLEKIDSQPLITSKSSQCNGTEKDVEVMSPSNPVRSNSSAENGPNTGAGKDNADNGAKVEDDGTKTKQDSSFEKVKRAAVSTLAAAAVKAKLLANQEEDQIRQLTSLLIEKQLHKLETKLAXFNDVENVVMRAREHVERSRHKLYHERALIIASRLGIPPSSSRGVPPSIPTNRIPTNIANSLPRPQMMMNPPRPLISRPAGTVATIQNPLTPSTAAGNSVRPSNQEKLSSVGTK

SEQ ID NO: 32064 - protein, 208 aa, Glycine max
  Clone ID: TF_GmC116854_1.pep
MGRHSCCYKQKLRKGLWSGSRDEKLLNYITKHGHGCWSSVPKLAGLQRCGKSCRLRWINYLRPDLKRGAFSQQEENSIVELHAVLGNRWSQIAAQLPGRTDNEIKNLWNSCLKKKLRQRGIDPNTHQPLSEIENDKDKPLTADKSNQKASNEVMSHSEPPKPKPIATTATTSMPMDRHPLEVSSTSKISSGNNNSTLYRFDSSITVLI

SEQ ID NO: 32065 - protein, 280 aa, Glycine max
  Clone ID: TF_GmC57353_1.pep
GQISREEIFQAKKRKLSLRCMSCWGTGGQQLQQNYQEETWRLELLVDGIDQEILNWVKDGKYIFLFGGDDPEWVRRFVKEARRVATATQIPLEMVYVGKSNKREQVQKIIDTIIRDKLNTQYWSEQSMIWFFWTRLQSMLFSKLQLKQTDDDDHVMQEIKKLLSYDKQGGWIVLARGSHIVVNGHATTGLQTLVEYDAVWKELADRDGFEPAFKNHYDKVHSIVSPCCRFEFSHSMGRIPERLTCPECRRNMHVLTTFQCCHDEKIDEDFFVSTVTPPTI

SEQ ID NO: 32066 - protein, 415 aa, Glycine max
  Clone ID: TF_GmC692_1.pep
MGRHSCCYKQKRRKGLWSPEEDEKLLRHITKYGHGCWSSVPKQAGLQRCGKSCRLRWINYLRPDLKRGTFSQEEETLIIELHAVLGNRWSQIAAQLPGRTDNEIKNLWNSCLKKKLRQRGIDPVTHKPLSEVENGEEDKTRSQELSNELNLLNSESFKSDEGSYEQRASSSIAPKAYEMEGSCSSKINTTKNDTNLMSNCSNKDMFLDSYTTSCQPSDLMGNYPLQITDTLPTNSNSCHWFSQTARPFDMNSEFTITSNVMSILPPTTTSFLPSTSFCYKPSLGVPSEDISTASFALNGPNYWEASASNNSNGSNNTSDGSRELTTTSSKNSVLSSWGLTEETKWSEYLQNPMLMLAAPESLCNQIRPATHLVPDNTLGSIIVPDSKDQQQQQQSQNSSIFSKDTQKLTAAFGHI

SEQ ID NO: 32067 - protein, 207 aa, Glycine max
  Clone ID: TF_GmC1076_1.pep
FGSSRGRSGKSCRLRWFNQLDPRINRSPFTEEEEERLLASHRIHGNRWAVIARHFPGRTDNAVKNHWHVMMARIRRERSKNYSPKQPLFPPNLQVDLETNFETIPSFVDKYYEKYSHPCVALTHSSFQFPTKNFYFQDPSSAGSTVPRDNCESVEFYDFLQVNTDSNKSEVTDNARRDEEEVSQDAVGMKNKDNGVPFIDFLSTGGC

SEQ ID NO: 32068 - protein, 82 aa, Glycine max
  unsure (1)..(82): unsure at all Xaa locations
  Clone ID: TF_LIB3109-021-Q1-K1-D10.pep
EKMRLKKEPWAIEEDQILRCYIDKHGHGXNWPALSKQASLLRCGKSCILRWINYVRPDVQRRNFTIDEEDTIIELDDMLRNR

SEQ ID NO: 32069 - protein, 104 aa, Glycine max
  Clone ID: TF_jC-gmro02910019d05a1.pep
QQILFPTLGRKKMVQREIRRGPWTEQEDYKLVYFVNMFGDRRWDFIAKVSGLNRTGKSCRLRWVNYLHPDLKRGKLTPQEEHLVMDLHSKWGNRFENHAEIIKL

SEQ ID NO: 32070 - protein, 260 aa, Glycine max
  Clone ID: TF_GmC937_1.pep
MERSLSGSSEEEMSITKGPWTEEEDSVLFNYITVHGEGHWNSVARYTGLKRTGKSCRLRWLNYLRPNVRRGNITLEEQLLILDLHSRWGNRWSKIAEHLPGRTDNEIKNYWRTRVVKQAKQLKCEVNSKQFRDTLRFVWMPRMLERIQAQASSSSSSSSGQAHQTTLISNAQAHSDPCGVMTTNPSLLSEVSSSALDAHAPSLYDSSASYNLMGGGSSSSYSAEYCYYSDIAGNGFGGSDLWTDENICFLQQLLADHDLS

SEQ ID NO: 32071 - protein, 393 aa, Glycine max
  Clone ID: TF_GmC1085_1.pep
VRIPGSAPPFRNHGLSPPVLSHKWGRHSCCVKQKLRKGLWSPEEDEKLFNYITRFGVGCWSSVPKLAGLQRCGKSCRLRWINYLRPDLKRGMFSQQEEDLIISLHEVLGNRWAQIAAQLPGRTDNEIKNFWNSCLKKKLLKQGIDPSTHKPLTEAHVKEEKKIIETSPMQTPLSQGPSVPLIFPSSQGSSLLISDSSYYDGGLTEASREIFMTKPALDPLSYYDFPMGVAQSGFNLPVSQYQTSLKASDQNPFGPNSSYVFSSMPSLTNSDHGNVSVTEFSDNNSASKISSLFMNDQVKESSSNSSNLSTIYHGGGCHISSMMENAGFSWEGDNKFDPLFQFQVNATKSEDFKTSSWEEGQLHTQNSIDFTSFPLTSLSEDLTGANFDVFQHI

SEQ ID NO: 32072 - protein, 154 aa, Glycine max
  unsure (1)..(154): unsure at all Xaa locations
  Clone ID: TF_GmC241740_1.pep
MGRIPCCEKDNVKRGQWTPEEDNKLSSYIAQHGTRNWRLIPKNAGLQRCGKSCRLRWTNYLRPDLKHGQFSDSEEQTIVKLHSVFGNRWSLIAAQLPGRTDNDVKNHWNTKLKKKLSGMGIDPVTHKPXSHLMAEXATTLAPPQAAHLAEAALG

SEQ ID NO: 32073 - protein, 210 aa, Glycine max
  Clone ID: TF_GmC189_2.pep
MGRSPCCEKAHTNKGAWTKEEDHRLISYIRAHGEGCWRSLPKAAGLLRCGKSCRLRWINYLRPDLKRGNFTLEEDQLIIKLHSLLGNKWSLIAGRLPGRTDNEIKNYWNTHIRRKLLSRGIDPATHRPLNDDKVLERCPDLNLELTISPPRQPQSDQHHLKPVGRNSNLCFACSLGLQNSKDHCSCALNTANAASGHDFLALKTSVLEMK

SEQ ID NO: 32074 - protein, 240 aa, Glycine max
  Clone ID: TF_GmC937_2.pep
MERSSEEEMLITKGPWTEQEDSLLFNYITVHGEGHWNSLLSYSHSSRLKRTGKSCRLRWLNYLRPNVRRGNITLQEQLLILDLHSRWGNRWSKIAEHLPGRTDNEIKNYWRTRVVKQAKQLKCDVNSKQFRDTLRFVWMPRMLERIRAQASSSAQAHQSSLISNSNTQAHSGLLSSALHAHAPSLSDSSASYNLMGADAGSCSSHSYYSDIAGNGFGGADLWTDQNICFLQHQLAHHDLF

SEQ ID NO: 32075 - protein, 171 aa, Glycine max
  Clone ID: TF_GmC106208_1.pep
MGRSRLEPIRLEEDPNQRSRRKKNAASGENSESGAAGQGAGEGKKALYHCNYCNKDITGKIRIKCAMCPDFDLCIECFSVGAEVTPHKSSHPYRGMDNLSFPLICPDWNADDEILLLEGIEMYGLGNWTEVAEHVGTKNKESCIEHYRNVYLNSPYFPGPDMSYDGGKNRK

SEQ ID NO: 32076 - protein, 147 aa, Glycine max
  Clone ID: TF_GmC1274_7.pep
MLLSSSCSAAGSAVSGEIMLFGVRVVVDSMRKSVSMNNLSQYELPRDAANAKDDVAAGYASADDAAPINSGKNRDRKRGIPWTEEEHKLFYLGLQKVGKGDWRGISRNYVKTRTPTQVASHAQKYFLRRTNLNRRRRRSSLFDITTD

SEQ ID NO: 32077 - protein, 164 aa, Glycine max
  Clone ID: TF_GmC879133_1.pep
MGRSPCCEENVGVKKGPWTPEEDEKLIDYISKHGHGSWRTLPKRAGLNRCGKSCRLRWTNYLTPDIKRGKFSEEDERIIINLHSVLGNKWSKIATHLPGRTDNEIKNYWNTHIRKKLLKMGIDPETHKPRTDLNHLMSLSQLLGTSNLSSAMNTTWGNNPLGLQ

SEQ ID NO: 32078 - protein, 551 aa, Glycine max
  unsure (1)..(551): unsure at all Xaa locations
  Clone ID: TF_GmC6850_1.pep
MVQDMKQQDNGESKKKERHIVTWTQEEDDILREQIGIHGTENWAIIASKFKDKTTRQCRRRWNTYLNYDFKKGGWSAEEDMLLCEAQKVFGNRKTEIANLVSGRTDNAAKNRFSTLCRKXTIIYIXKKEICTSHINSTNMGLKSQHCNNMDTTSESGVPIKNLRRADIADDAEKIKFEDRSHLRNGTPINQQPRAPLAVLAQNSHNSNNLTDQHHLCNPKFSSSAQNNKIQGTFLKKDDPKISALMQQAELLSSLALKVDTENMDQSLENAWKVLQEFLNRSKESDIPGQKVPDVRLVDLKDMIEELKSGNEEGRVLQELLNRTKESDSTGHKIPDLRPADFKDMVEDSKSGNEEGQVLQEFLNRTNKSDIPEHKIPNLQLVDLKDMIEDLKSGNEEGQACWRKMDCYENSPGSSGYSTGSILICQSASDNLEHSLHQDIGTEMKSKQLEDEKGVKVVMPTANVDQDMVPCCMEQINNDGIVSTSSRLEFSSPLQVTPLFRSLAAGIPSPQFSESERNFLRKTLGMESPSINPSANSSQPPPCKRALLPSL

SEQ ID NO: 32079 - protein, 127 aa, Glycine max
  Clone ID: TF_GmC142212_1.pep
MGRAPCCDKANVKKGPWSPEEDEKLREYIEKHGTGGNWIALPQKAGLKRCGKSCRLRWLNYLRPNLKHGEFSEGEDRIICTLFASIGSRWSIIASQLPGRTDNDIKNYWNTKLKKKMMGVEMNPFST

SEQ ID NO: 32080 - protein, 336 aa, Glycine max
  Clone ID: TF_GmC192_1.pep
MGRQPCCDKVGLKKGPWTAEEDKKLINFILTNGQCCWRAVPKLAGLLRCGKSCRLRWTNYLRPDLKRGLLSEYEEKMVIDLHAQLGNRWSKIASHLPGRTDNEIKNHWNTHIKKKLKKMGIDPVTHKPLSNKTEQTQAQPDEQQTHQPLQEQQEEPIPVEKDTKFEPEKEQNKEPEKPESSIESLTITEEAKEEDQIMTPLFDSWELMNEFCTDEVPIIESNEILVPSAPSSTSPTTTTTTSSSTSTSASSNSNSSNFLEDLLLPDFEWSDDYNDTNFDNNNNSSMALWDDDFIRSWNLLINDDDGDGDRKQVFEAPINQYPRVIMDSDSWAYGLF

SEQ ID NO: 32081 - protein, 336 aa, Glycine max
  Clone ID: TF_GmC100_4.pep
MRKPEVSGNNNNNNNINNKLRKGLWSPEEDDKLMNYMLNSGQGCWSDVARNAGLQRCGKSCRLRWINYLRPDLKRGAFSQQEEELIIHLHSLLGNRWSQIAARLPGRTDNEIKNFWNSTIKKRLKNMSSNTSPNGSESSYEPNNRDLNMAGFTTSNTQDQQHADFMPMFNSSSQSPSMHAMVLNSIIDRLPMLEHGLNMPCSGGFFNSTGPCFSSSQSGVDNKGIYLENGGVFGSVNIGAEGDVYVPPLESVSTTSDHNLKVESTCNTDTNNSYFDDINSILLNNCNINSNNKRAENRAGGVENLFQEELTIGEWDLEELMKDVSSFPFLDFSNIQ

SEQ ID NO: 32082 - protein, 195 aa, Glycine max
  Clone ID: TF_GmC875_2.pep
GESNHGTKASRSDQERRKGIAWTEDEHRLFLLGLDKYGKGDWRSISRNFVVTRTPTQVASHAQKYFIRLNSMNKDRRRSSIHDITSVNNGDISAPQGPITGQTNGSAGNSTAKAAKAATPASTGVPGVGIYAAPTIGQPIGGPLVSAVGTTVNLPAPAHMAYGVRAPVPGAVVPGAPVNMGPVTYPMQHTSVPHR

SEQ ID NO: 32083 - protein, 178 aa, Glycine max
  Clone ID: TF_GmC8609_13.pep
DYGELDGDSWTDQETLLLLEAMEIYNENWNEIAEHVGTKSKAQCILHFLRLPMEDGKLENINVPSMSLSSNAINRDHSGRLHCYSNGDTAGTVHQTRDSDNRLPFANSGNPVMALVAFLASAVGPRVAASCAHAALAVLSEDNSGSTSQMEAPGHDNRTNSENIHSRWWPSWRNSSFK

SEQ ID NO: 32084 - protein, 74 aa, Glycine max
  Clone ID: TF_GmC316_1.pep
MADIDRSFDNNVSAVSTEKSSQVSDVEFSEAEEILIAMVYNLVGERWSLIAGRIPGRTAEEIEKYWTSRFSTSQ

SEQ ID NO: 32085 - protein, 206 aa, Glycine max
  Clone ID: TF_GmC1195_1.pep
MDKKPCNSSSHDPEVRKGPWTMEEDLILINYIANHGEGVWNSLAKASGLKRTGKSCRLRWLNYLRPDVRRGNITPEEQLLIIELHAKWGNRWSKIAKHLPGRTDNEIKNFWRTRIQKHIKQAETSQQHGNSENNDHQASTSTSKVSTMAHPNETFSPPSYQGTFEPFQPQFPTITDQSSCCTTTNDNNNYWSIEDIWSSMQLLNGD

SEQ ID NO: 32086 - protein, 251 aa, Glycine max
  Clone ID: TF_GmC1584_1.pep
EDVEVQEPLEESVDANQEVGGFDLSPRRDKAIPKRNSQLKHKHSAFRASHRGRGVEISSPKEVKATKSWSKHDPVPSAEVKKVRESLKSSSLELRALVKDPLPHALHISDVVRSKLATSDTKTEPLIENQHEDVEVQDPDVCQSIVPFQPNDVNLGKKSFVHCSNIHQPSLMERNRSARTFEWEDSIDNSQQARQPRRRKRKWSSLEEETLRAGVKMFGEGNWATIRSFYSNIFENRSGVDLKDKWRNMIR

SEQ ID NO: 32087 - protein, 128 aa, Glycine max
  Clone ID: TF_17022754.pep
MRNPSSTTTTAATTTTKTKVKNNSNNNIGSNNSPCCNKVGLKRGPWTPEEDEVLANYIKKEGEGRWRTLPKRAGLLRCGKSCRLRWMNYLRPSVKRGHIAPDEEDLILRLHRLLGNRYLYHLLFRFRI

SEQ ID NO: 32088 - protein, 300 aa, Glycine max
  Clone ID: TF_GmC283_2.pep
MELETLYTPCYMPNSNWFVQESLSTEWTREDNKKFESALAIYDKDTPDRWFKVAAMIPGKTVFDVIKQYRELEEDVSEIEAGHVPIPGYLASSFTFELVDNHNYDGCRRRLAPVRGSDQERKKGVPWTEEEHRRFLMGLLKYGKGDWRNISRNFVVTKTPTQVASHAQKYYIRQKVSGGKDKRRPSIHDITTVNLTETSASDKNKPPVIAPQQKLNSMSKVQLDWTSSHYNDGSLMVFNPNSDDLFVSSSSDVTSMALKMQGQDLYECALREAYAKVKVPGFSMAPRDFNNEAVFGIHAL

SEQ ID NO: 32089 - protein, 158 aa, Glycine max
  Clone ID: TF_GmC14594_1.pep
METKDDSAEKEEAWSSHEDEILLNYVQVRGEGNWRNLPKRAGLKRCGESCKQRWLNYLKPTISRGNISLDEHELIIRLHKLLGNRWSIIAGRLPGRTEEEIKNYWNTYLRKEAEENQNNKNEFPSTSMTTTSMSSVQSPWYFRTFRRYQSHGISKSCD

SEQ ID NO: 32090 - protein, 124 aa, Glycine max
  Clone ID: TF_GmC941313_1.pep
HASGWSLIAGRLPGRTDNEVKNYWNSHIRRKLISKGIDPNNHRLKHAIPSSLQNSLMSDDSAEAFRMKDTNKNETSKLPRVYNHVEVSDAASGEAESPCAWPDLNLDLSITNPAASQSMGNNVK

SEQ ID NO: 32091 - protein, 46 aa, Glycine max
  Clone ID: TF_uC-gmrominsoy223d02b1.pep
STGLLRCGKSCRLRWINYLRPDIKRGNFTREEEDTIISLHEMLGNR

SEQ ID NO: 32092 - protein, 265 aa, Glycine max
  Clone ID: TF_GmC600_2.pep
QQILFPTLGRKKMVQQEIRRGPWTEQEDYKLVYFVNMFGDRRWDFIAKVSGLNRTGKSCRLRWVNYLHPDLKRGKLTPQEEHLVMDLHSKWGNRWSRIARRLPGRTDNEIKNYWRTHMRKKKAQEKKHASAASPVSSSCQSSLSSNNHSCYDTGGYDDGMMMGLIGGEKGYSMDDIWKDIMSEEENNIYNNNLQPVYEGHSEEGCNFSCPPPPMIMPSPPSWDQYNISSQPLWVMDEEESNKMLFPTLSDQYFPYYEQGNAFLTG

SEQ ID NO: 32093 - protein, 265 aa, Glycine max
  Clone ID: TF_GmC600_3.pep
VQQDIRRGPWTEQEDYKLVYFVGMFGDRRWDFIAKVSGLNRTGKSCRLRWVNYLHPDLKRGKLTPQEQHLVMDLHSKWGNRWSRIARKLPGRTDNEIKNYWRTHMRKKKALEKKHASASASSPVSSSCQSSLSSNNHVVDSHASKESFYDTGGYDDMMMGLIGGEKGYSMDDIWKDIVLSGEENSIYNNNNLQPVYEEGHSEEGFNFSCPPPMMIMPSPPSWDQYNISSQPLWVMDEEESNKMLFPTLSDQYFSHYEQGNEFLTG

SEQ ID NO: 32094 - protein, 266 aa, Glycine max
  Clone ID: TF_GmC184_2.pep
MYWEVMAGNMGWSVIIEEEGWRKGPWTSEEDRLLIQYVKFHGEGRWNSVARLAGLKRNGKSCRLRWVNYLRPDLKKGHITPQEESIIQELHARWGNRWSTIARSLPGRTDNEIKNYWRTHFKKKTKTPSDAAEKARIRSSRRQQFQQQQQQLKQQQVQQQQQQQQQFQFNLDMKGIINLLEENNHRVPSISQEAQEMASMYPNTSEHQDYFYSMFNVNDNNVSAPECLNEEILWDGLWNLDDVLCNFNAASATSKASLHNLVAPFC

SEQ ID NO: 32095 - protein, 503 aa, Glycine max
  Clone ID: TF_GmC1182_1.pep
MATAESGPRAKIMATTATEPLPSSAEMPPAPPPPKQPPQPVAAASAVKPEAPLSDSKASAEANVIVVPSYSRWFSWDSIDECEVRHLPEFFESASKSPRVYKYYRNSIVKYFRYNPTRKITFTDVRKTLVGDVGSIRRVFDFLETWGLINYHPSSSLTKPLKWDDKETKSDSASNTTESSSAPAKENTKRLCSGCKVVCTIACFACDKYDLTLCARCYVRGNYRVGVNSSDFRRVEISEETKTDWNEKETTNLLEAITHYSDDWKRVSQHVPGRTEKECVAHFLKLPFVDQFQHYQQHPAVNGTDDSCNPLKRVTNADAESELDTVASAEPNKRMRLTPLADASNPIMAQAAFLSALAGSEVAQAAAQAALTTLSEVYKATKINYRSFPRNTLLQDAGIMSNGGNTSDSFQGSRLHANIQLEKEELDVEKAISEIIEVQMKNIQDKLVQFEDLDLLMEKEGQQLEQMKNMFFLDQLTLLFHKSSAPKTGECQEGNNVKTNHGY

SEQ ID NO: 32096 - protein, 321 aa, Glycine max
  Clone ID: TF_GmC1004_1.pep
MKWEMEILPPASPYMYNSNWLLDDNRTNNTKWTPAENKLFENALAVYDRDTPDRWHKVAEMIPGKTVMDVVKQYKELEADVCDIEAGLIPIPGYSSGTTTTSPFTLDWVNTSPAYDDGFKGITAKRSSSGRPLEQERKKGVPWTEEEHKLFLLGLKKYGKGDWRNISRNYVITRTPTQVASHAQKYFIRQLSGGKDKRRASIHDITTVNLTETTRTSSDESKRSASPQNSAMLSRHQQLNSNAASSGLNFQWSDQPNAGVAMALNPAHEQVFMSPYGLNSYGFKMQGQNLHRSSLHESSYLGPQTPNMVFQMQPSQHYSHA

SEQ ID NO: 32097 - protein, 303 aa, Glycine max
  Clone ID: TF_GmC143_1.pep
MEFLDEDARPRFVFQSGAAARSSEPPHPIHKPTKPFLFATVSLSSLFLTLSLFFLEAEPFKSLLFWLALSLLVGPFAPPSITGGDVRVGRGEVVNFPDPEPEPDEDASRKSSQRRSRQRRAEEASAAVGPVVSVSAAEKRKESSGIEKRATVVEEEKGWSEEDVEVLKKQMVKNPVGKPGRWEAIAAAFGGRHGVDSVIKKAKELGEKRVDDSESYALFLKKRKALDKRVVEENADEGEKVVDNGWSSAEDIALLNALKAFPKEVSMRWEKVAAAVPGRSKAACMKRFAELKKGFRTAKAAAE

SEQ ID NO: 32098 - protein, 360 aa, Glycine max
  unsure (1)..(360): unsure at all Xaa locations
  Clone ID: TF_GmC1274_1.pep
MLIFLKSKSIIPGSSPYVTITHPYRNSRAASLCLNFPSFSLFLSPSHALGSTRTNSDPPPSHTQPAPPPDPTMSRASSAADSAASGEIILFGVRVVVDSMRKSVSMSNLSQYEHPQDATNNKDALAAGYASADDAAPQNSGRLRERERKRGVPWTEEEHKLFLVGLQKVGKGDWRGISKNYVKTRTPTQVASHAQKYFLRRSNLNRRRRRSSLFDITTDTVSAIPMEGEQVQNQDTLCHSQQQSPVFPAETSKINGFPAMPVYQFGVGSSGVISVQGALXNPMEELTLGQGNVEKHNVPNKASTVSGIITPGSSSSAIDPPPTLSLGLSFSSDQRQTSSRHSALHAMQCFSNGDSIISVA

SEQ ID NO: 32099 - protein, 233 aa, Glycine max
  Clone ID: TF_GmC344_2.pep
MGGRQMLLEQAKVLRDALSSKKEEAVDEKTNQQNANGSIKANGSPSLSNIEKKEKPWSKEEIDLLRKGMQKYPKGTSRRWEVISEYIGTGRSVEEIMKATKTVLLQKPDSSKAFDTFLEKRKPGAQSIESPLTTREELGVPAPASSTNNAEDSQNKGTDDQNSPANGVSSSSEQDVWSAVQERALVQALKAFPKETSQRWERVATAVPGKTVNQCKKKFALMKESFRNKKTAV

SEQ ID NO: 32100 - protein, 318 aa, Glycine max
  unsure (1)..(318): unsure at all Xaa locations
  Clone ID: TF_GmC1167_1.pep
MVGGHKKKKRCSEFASKNKDHKMGNHCRCILVCQSTGQGTALDGQITSCQEPRHGTSNSRTVDTNTGLSRCSKSCRLRWTNYLRPGIKRGNFTPHEEGMIIHLQALLGNKWAAIASYLPQRTDNDIKNYWNTHLKKKLKKFQAALDPHSASDSTASXSISTKELYHHQSQSSSTTTYASSTENISRLLEGWMRSSPKQLNKGSSSQDDEDIQLQGINDDDKNNNNFESTTKLVNLHHLQHKVRNKDEHQEEKSSEASAAADHHHHHHHDIAAAHERNNVRQKSENSSGAPPLSFLEKWLLDENVGHQVEEMMELSPMF

SEQ ID NO: 32101 - protein, 104 aa, Glycine max
  unsure (1)..(104): unsure at all Xaa locations
  Clone ID: TF_jC-gmXLIB3563P045ah05a2.pep
MMAAARKELDRIKVPWNTDEDEDLHKLEERHGPKNWSLIIMSIPWRSGKSCRLHWCNQLYGQVEHRAFTPXEDKTIIKAHAKFVFNXATITRLLXTRTDNAIKN

SEQ ID NO: 32102 - protein, 133 aa, Glycine max
  Clone ID: TF_uC-gmroLIB3258P126b12b1.pep
MVQDMKQQDNGESKKKERHIVTWTQEEDDILREQIGIHGTENWAIIASKFKDKTTRQCRRRWYTYLNSDFKKGGWSAEEDMLLCEAQKVFGNRWTEIAKVVSGRTDNAVKNRFSTLCRKKQKYAALAKENSTL

SEQ ID NO: 32103 - protein, 312 aa, Glycine max
  Clone ID: TF_GmC1812_1.pep
MSTSKSVSSSSEDDNELRRGPWTLEEDNLLSQYIFNHGEGRWNLLAKRSGLKRTGKSCRLRWLNYLKPDVKRGNLTPQEQLIILELHSKWGNRWSKIAQHLPGRTDNEIKNYWRTRIQKQARHLKIYTDSREFQELVRRFWMPRLLQKAKESSSSNMSIQNQAIPMPFDYVSQHLTVGTIPPWQGPCMNEAGPTYMDQHEQNSDSEHNNGSCISLSESANFPKVPQHFGRTTITQYHALNNNDFGTFTYDGYNVSNNVYEMDNFKTPTTRVAEDAQYPTGDCQMVGSNWVNSDFACNMWNMDELWQFSKLQK

SEQ ID NO: 32104 - protein, 171 aa, Glycine max
  Clone ID: TF_uC-gmflLIB3275003f07a1.pep
YFCYHGPWTAEEDKKLINFILTNGQCCWRALPKLAGLLRCGKSCRLRWTNYLRPDLKRGLLSEYEEKMVIDLHAQLGNRWSKIASHLPGRTDNEIKNHWNTHIKKKLKKMGIDPVTHKPLSNKTEETQAQPDEQTHQPLQEQQQQQHQHQQQPIPVEKDLKFEPEKEQNRE

SEQ ID NO: 32105 - protein, 636 aa, Glycine max
  Clone ID: TF_GmC344_4.pep
MAVHTEFPLITYSQEIVDGQPIFVSSNCLPIKALKFEPAGHSFHSAALKLLGVQEDNNDADDKKVVDDKEQTYLPSDSYSSKSKKKTGTGDMQQDHYALLGLGHLRYLATEDQIRKSYRETALRFHPDKQAALLLAEETEAAKQAKKDEIESHFKAIQEAYEVLIDPVKRRIYDSTDEFDDEIPTDCAPQDFFKVFGPAFMRNGRWSVNQPIPSLGDDNTPLKEVDNFYNFWYSFKSWREFPHADEFDLEQAESRDHKRWMERQNAKLTEKARKEDYARIRTLVDNAYKRDPRRLRRKEEEKAEKQRKKEAKFLAKKVQEEEAARIAEEERQRKEEEERQAAKAALQQKKVKEKEKKLLRKERARLRTLSGPILSQHLLDISDDDVERLCMSLDIEQLRSLCENMEGRQMLLEQAKVLRYALSSKKEEVVDEKTNQQNANGSIKANGISSLSNIEKKEKPWSKEEIDLLRKGMQKYPKGTSRRWEVISEYIGTGRSVEEIMKATKTVLLQKPDSSKAFDTFLEKRKPGAQSIESPLTTREELGVPAPASTNNVEDSQNKSTDNQNSPANGVSSSSEQDVWSAVQERALVQALKVFPKETSQRWERVATAVPGKTVNQCKKKFALMKESFRNKKSAV

SEQ ID NO: 32106 - protein, 301 aa, Glycine max
  Clone ID: TF_GmC503_1.pep
NSARADLKRGMFSQQEEDLIISLHEVLGNRWAQIAAQLPGRTDNEIKNFWNSCLKKKLMKQGIDPATHKPLLSAQEHIIIKEEKETILETPPPMLLPMSQGILASSQESPLVVNNSSYCDGGLNVTEAASREVFMSKNAALDPLSYFEFQMGYNPIRQFDQNHVGTNSSYGFSSLPCLNSSSDHGNVSVAAEFSDNNSASKISSLMKESSSNSSSMSVYPAGGGCQMMENAGFSWDGENNNTKIDPLLQFHVNVLKSEEFKTSSWQEEQILTQNLIDFTNYPLMSLSEDLTGANFDVFQQM

SEQ ID NO: 32107 - protein, 57 aa, Glycine max
  Clone ID: TF_uC-gmrominsoy034e07b1.pep
DESVENGELEDAPKLTLQTTDQELVNDYWCKKCAVQPSWVPIINYVDVNKKDPWKRS

SEQ ID NO: 32108 - protein, 159 aa, Glycine max
  unsure (1)..(159): unsure at all Xaa locations
  Clone ID: TF_GmC642_10.pep
SIFANFLYRSWLIDIGGFAKKVKSTTLSSADQIKDCGAYRECPNCSYHIDNSDVSTEWPGFPLGVKFDPSDVELLEHLAAKCGIGNTQQHMFINEFIPTLEGDQGICYTHPENLPGAKKDGSYVHFFHRTTNAYATGQRKRRKIHXNRVLTEEHVRWHK

SEQ ID NO: 32109 - protein, 93 aa, Glycine max
  Clone ID: TF_uC-gmroLIB3259P159h08a1.pep
VAKENQIIHSESIQVIGMKETLFFCKGPHEQRLQWVMHELRLVASYPCQMPVADFAVYRIFQKNKMKTRRSHGKKPSSSSKLQRLVDVKASGF

SEQ ID NO: 32110 - protein, 54 aa, Glycine max
  unsure (1)..(54): unsure at all Xaa locations
  Clone ID: TF_LIB3242-770-P1-J1-D1.pep
RVLLKWKTFLLXXRREYXIDLPAXFLFHXTYEELIIHYLYKKVIYTXFFSKAYL

SEQ ID NO: 32111 - protein, 88 aa, Glycine max
  Clone ID: TF_uC-gmropic072f11b1.pep
LSTTATTTVNTTANPAPAPPTALATCFAPRSRVHETDEELVKHYVKRKGCGKSALSDAVSDGDIHRSEPCELRDKTREQKRDQERALF

SEQ ID NO: 32112 - protein, 127 aa, Glycine max
  unsure (1)..(127): unsure at all Xaa locations
  Clone ID: TF_LIB3092-021-Q1-K1-B7.pep
EKPADRRVRTRQFSSSSSFLTSIITTSAAFFDKIELPFTKIEPPKKDPLSQLTLPPCXPFYPTDNELLVQHLCPKVASHHFSLTIITQIDLYKFNPPNLTIKTNFNEKKXYFFSPKHMKFPNRFSPN

SEQ ID NO: 32113 - protein, 48 aa, Glycine max
  Clone ID: TF_jC-gmXLIB3563P084ad08a1.pep
SVGIGHRNCDLQDRHFFIPKEAKYRNGNRMNRTQSVDIERQQAQTKKY

SEQ ID NO: 32114 - protein, 59 aa, Glycine max
  unsure (1)..(59): unsure at all Xaa locations
  Clone ID: TF_uC-gmrominsoy306c04b1.pep
SCGWKSRAAYEKLVVCWVCLKGSYEHIEVNIINDMDLYNXEPWDLPGMVLYGEKEWFFF

SEQ ID NO: 32115 - protein, 39 aa, Glycine max
  Clone ID: TF_700874479H1.pep
RDPLALLSLPPGLRVYPTDEELLVQYRFCIVSCHHCSLP

SEQ ID NO: 32116 - protein, 81 aa, Glycine max
  unsure (1)..(81): unsure at all Xaa locations
  Clone ID: TF_9901760.pep
WPAGFMSHPTDNELVWQFLRRKVVCCPLTIFIIPEVDVCKFDPWDISGDIESEXFSICTEDAGYIIGNRSNIAPYYWQTIA

SEQ ID NO: 32117 - protein, 141 aa, Glycine max
  Clone ID: TF_uC-gmroLIB3259P208f01a1.pep
GGSKNLNWQRFFFHDLRTRVFENLNKREAGIGQWRAIEKAQDFELSKEQVVARKNVLAFWEAKGNGFAKSNWVMHEFRLVSKSHPSMVSAMAVYRIFKTKKEERERRQKGLKGRPLAAAAVRKKLWMRHPLSLISQWRMAL

SEQ ID NO: 32118 - protein, 284 aa, Glycine max
  unsure (1)..(284): unsure at all Xaa locations
  Clone ID: TF_GmC207_1.pep
MGSFLNFLLDSTFTNIHSFSLIFHLHHIFFNFISFFTKISFFLFFLFSFSFLIYIYIYIYIYIYIYIYIYIYIYIYIYISKDGQIRHFFHRPSKAYTTGTRKRRKVHTDDEGIETRWHKTGKTRAVFAXSGGAVKGFKKILVLYTNYGRQKKPEKTYWVMHQYHLGSTEEEKDGELVVSKVFYQTQPRQCGNPIIIKDSYEKMLNDGSGQDNINISLIPKTTATLLDCYTAPYIDYDHVHVSHNRESSSQLIIPSSVVQVDGSYIRLTMDAKKARFESNTGKRF

SEQ ID NO: 32119 - protein, 45 aa, Glycine max
  Clone ID: TF_LIB3242-524-P1-J1-A6.pep
PWNVPDWFNFFHGDSKNLTSKWLIRTTNCKYWNVTAKDRDIITVD

SEQ ID NO: 32120 - protein, 48 aa, Glycine max
  unsure (1)..(48): unsure at all Xaa locations
  Clone ID: TF_jC-gmfl02220081f01a1.pep
MDIDIHTCEQWRLPVVAXLNANERSFFCXRDRKYATGLGTNTATTCGY

SEQ ID NO: 32121 - protein, 124 aa, Glycine max
  Clone ID: TF_GmC432953_1.pep
MTWCNDSDEERGIDQLVALTITPTSTNNTTVLTDHHTKASEIRTLTCPSCGHNIEFQDQTGINDLPGLPAGVKFDPNDQEILEHLEAKVFSDVPKLHPLIDEFIPTLEGENGICYTHPEKLPGV

SEQ ID NO: 32122 - protein, 120 aa, Glycine max
  unsure (1)..(120): unsure at all Xaa locations
  Clone ID: TF_LIB3138-042-Q1-N1-C2.pep
VVPLGTVHGDFKPYFSGTISKRPLTHLFISLADGFVRPIAACPYSKLAPCDRFHRNDEELILDXRIATVASVRLSAHIIAEADIYMLDPWDYPANATYVEQEWYLLSPRDGKHPNGAGPY

SEQ ID NO: 32123 - protein, 211 aa, Glycine max
  unsure (1)..(211): unsure at all Xaa locations
  Clone ID: TF_LIB4128-056-Q6-K1-H2.pep
KQTPMFHRVMPTGFRIYPTDXEELLMEYXSPKVAGHHYXVAYIGEYGWDRCDPWGLPGSSIFGEKECCFFXPEYRRYPNGSRPNTGSGSGYWXKPTETNEIMTTRXPNDYIRKVLVLYFGKNLKGTITXVIMHEYRLLDSSRKNTVPSXDDCVLCXIYNMNCCAQKTAQNGVDPSDELTLYSNGYSLSSSTQLEDYLESLPSIDERCFTMP

SEQ ID NO: 32124 - protein, 84 aa, Glycine max
  unsure (1)..(84): unsure at all Xaa locations
  Clone ID: TF_21994330.pep
HPSPLHFFSLXSPFLIITPHSSPSLPXYPSHIIPFPSXYPSNXLPHYPXXSLTLFHPSPFFSFKNTTPSLQPILFHXPPPPPTX

SEQ ID NO: 32125 - protein, 90 aa, Glycine max
  unsure (1)..(90): unsure at all Xaa locations
  Clone ID: TF_LIB3170-055-Q1-K1-C1.pep
LHFPYVFRPYSTQKYIISVEKVNTAKNGELILPPELRFHPTDEELVMQYLERKDFSXPVPACIIPELHVRQCDPWDLPRDLEQERYLFST

SEQ ID NO: 32126 - protein, 77 aa, Glycine max
  unsure (1)..(77): unsure at all Xaa locations
  Clone ID: TF_jC-gmle01810023f12a1.pep
MGVPERDPAAQASQATGCRSYPTDDERLVQVLCRKAAGHHLSVAVVADDDLYKYDPWALSGXAVFGEKEWFFLRPGD

SEQ ID NO: 32127 - protein, 117 aa, Glycine max
  Clone ID: TF_uC-gmflminsoy023h05b1.pep
ILFLSLFQSSLMLISTSLIHGNYQLDDWVLCRIYKKGNTQRSHERDDSIDDMIGEVPPSINVGHMSARFHLSRMSTSYSGALLENDRNTLEGVVIGNGSVNGISNTNNITSVISSSQ

SEQ ID NO: 32128 - protein, 156 aa, Glycine max
  unsure (1)..(156): unsure at all Xaa locations
  Clone ID: TF_GmC126188_1.pep
MEEPIVVNKGEEPLDLPPGFRFHPTDEEIITYYLTEKVRNSSFSAIAXGEADLNKCEPWDLPKKAKIGEKEWYFFCQKDRKYPTGMRTNRATESGYWKATEKIXEIYKGKGNLVGMKRTPRFYERRAPKGEKGYWVIDEIRSEGQWDATNLPRARR

SEQ ID NO: 32129 - protein, 398 aa, Glycine max
  Clone ID: TF_GmC642_6.pep
MARSWLIDIGGFAKKVKNTTLSTDDQMKDCGTYRECPKCHYHIDNSDVSHEWPGFPVGVKFDPSDVELLEHLAAKCCIGNREPHMFIHEFIPTLEGEQGICYTHPENLPGAKKDGSYVHFFHRTTNAYATGQRKRRKIHHQQGLTEEHVRWHKTGKTKAIIEDGAHKGFKKIMVLYVRSSENGSRSYKSNWVMHQYHLGTVEEEKEGEYVVSKIFCQQQKQTEKNEGNPMAEDPDNIISRTGPRTPKPNPPNPPRAGKSVDCDDNIDETVLLSSALDTKTIPGESHAPQSDIQDQDFTGNAAWLAGESQAEESTKYDGCDDILLCKEILDSSAILNDPGLDSTNLEDIAGYATQRARNDNESCGISVLDSLELDTPDFDLSSLYFCSQDSILDWMDRL

SEQ ID NO: 32130 - protein, 123 aa, Glycine max
  Clone ID: TF_18730400.pep
DMEERNHDGEKLDEVMLPGFRFHPTDEELVGFYLKRKIQQRPLSIELIKQLDIYKYDPWDLSKMATTGEKEWYFFCPRDRKYRNSARPNRVTGAGFWKATGTDRPIYSSEGSKCIGLKKSLVF

SEQ ID NO: 32131 - protein, 296 aa, Glycine max
  Clone ID: TF_GmC1124_1.pep
MGLRDIGASLPPGFRFYPSDEELVLHYLYKKITNEEVLKGTLMEIDLHTCEPWQLPEVAKLNANEWYFFSFRDRKYATGFRTNRATTSGYWKATGKDRTVFDPATREVVGMRKTLVFYRNRAPNGIKTGWIMHEFRLETPHLPPKEDWVLCRVFHKGKADNSAKLIMYESTVPSLTLASSSPTNQNTTPSIGYNQFLAPFSSSMATHHHNHNHHIPNQSQNNNNNSLMGLLQFSRETNTNNSSTVTQISPKCDDNNGYGFLWDMDLEENSFNDGVASNLDGMRFFELDNNNSVVLL

SEQ ID NO: 32132 - protein, 508 aa, Glycine max
  unsure (1)..(508): unsure at all Xaa locations
  Clone ID: TF_GmC580_1.pep
MGSVDCYPSRTDDAAVVSLDSLPLGFRFRPTDEELVNYYLRQKINGNGRXVWVIREIDFCKXETWDMLGLSVVQTKDPEWFFFCPQDRKYPNGHRLNRATNNGYWKATGKDRRIKSGKDLIGMKKTLVFYTGRAPKGNRTNWVMHEYRPTLKELDGTNPGQNPYVLCRLFKKHDESLEVSHCDEAEQTASTPVAYSTEEIQSDLAVVAGSPSQVTEDDKHQAMIPAHSEEAISNVVTPVVCRSDRYDACHAPNQIVLPTAEEFQPLNYYDPRNELLDDKLFSPVLAHIQPEFHYQANIESDDWYGLQYGTNETNMSDFLNSVVNWDQVSFEDLNCQQQSYPLFNVKDSILSSDLDSELANMTCMQAGYAEGAIDGRKPLVITSEFCSTTGIPVDCVGDEQKSNVGLFQNNSQRAFTDVNIGQVYNVVDDYEQRGICSAVASGNTGIIRRHREVQNEQLSSNSTQGTAQRRIRLSMATHGSNKMVKSGSCAQEELNLKSVIAMVRILFF

SEQ ID NO: 32133 - protein, 95 aa, Glycine max
  Clone ID: TF_GmC451863_1.pep
MSKISNWSSVSSSDLIDAKLEEHQLCGSKQCPGCGHKFEGKPDWLGLPAEVKFDPTDQELIEHLEAKVEAKNMKSHPLIDEFIPTIEGEDGICYT

SEQ ID NO: 32134 - protein, 253 aa, Glycine max
  Clone ID: TF_GmC416_2.pep
MEFLPPGFRFYPTEEELVVFYLHNQLEGQIHDTSRVIPVTDINGVEPWNLPTLAGEFCRGDTEQWFFFSPRQEREARGGRPNRTTASGYWKATGSPGHVYSSDNKVIGMKKTMVFYKGKAPTGRKTKWKMHQYKAIEHSHQSNTAPPKLRHEFSLCRVYVISGSFRSFDRRPLEMPRIELRVDGDRGAASTSTQQRAAVVDGLSSSDTSSHSGGGRGGSHISEAGAGSSGTNWNASNSRVEEPLWEWEQLNWP

SEQ ID NO: 32135 - protein, 153 aa, Glycine max
  Clone ID: TF_GmC625_16.pep
MPGELQLPPGFRFHPTDDELVNHYLCRKCAAQTIAVPIIKEIDLYKFDPWQLPEMALYGEKEWYFFSPRDRKYPNGSRPNRAAGSGYWKATGADKPIGKPKALGIKKALVFYAGKAPKGVKTNWIMHEYRLANVDRSASKKKHHHQQLEGMSR

SEQ ID NO: 32136 - protein, 108 aa, Glycine max
  Clone ID: TF_GmC525_5.pep
MEKVSFVKNGELRLPPGFRFHPTDEELVLQYLKRKVFSCPLPASIIPEVDVCKSDPWDLPGDLEQERYFFSTKEAKYPNGNRSNRATNSGYWKATGLDKQIVTSKGNQ

SEQ ID NO: 32137 - protein, 370 aa, Glycine max
  unsure (1)..(370): unsure at all Xaa locations
  Clone ID: TF_GmC424_2.pep
MGVPEKDPLSQLSLPPGFRFYPTDEELLVQYLCRKVAGHHFSLPIIAEIDLYKFDPWVLPSKAIFGEKEGDFFSELNKFDXLIFAGKAIFGEKEWYFFSPRDRKYPNGSRPNRVAGSGYWKATGTDKIITTEGRKVGIKKALVFYIGKAPKGTKTNWIMHEYRLLDSSRKNTGTKLDDWVLCRIYKKNSSAQKAVQNGVVPSNEHTQYSNGSSSSSSSQLDDVLESLPAIDERCFPMPRVNTLQQQQHEEKVNVQNLGEGGLLDWTNPSVLNSVVDFVSGNNNHNQLVQDQTQGMVNYNACNDLYVPTLCHVGTSVPQKMEEEVQSGVRNQRVQNNSWFLQNDFTQGFQNSVDTSGFKYPVQPVGFGFRN

SEQ ID NO: 32138 - protein, 118 aa, Glycine max
  Clone ID: TF_GmC625_8.pep
AVPIIKEVDLYKFDPWQLPEIGYYGEKEWYFFSPRDRKYPNGSRPNRAAGSGYWKATGADKAIGKPKALGIKKALVFYAGKAPKGVKTNWIMHEYRLANVDRSASKKNNNNLRVCPKL

SEQ ID NO: 32139 - protein, 298 aa, Glycine max
  Clone ID: TF_GmC625_19.pep
MPGELQLPPGFRFHPTDDELVNHYLCRKCAAQTIAVPIIKEIDLYKFDPWQLPEMALYGEKEWYFFSPRDRKYPNGSRPNRAAGSGYWKATGADKPIGKPKALGIKKALVFYAGKAPKGVKTNWIMHEYRLANVDRSASKKNTTTNNLRLDDWVLCRIYNKKGKIEKYNGVAVVDQKVAKLSEEEVQFQHETKPQIKMYGHDDFRNDQLYMDTSDSGPRLHTDSSCSEHVVSPDGTCEKEVQSEPKWNDLELGPDPALGFDFNFMDLTSDDAFAPQVQYQINHLSPWQEMFTYLPKTF

SEQ ID NO: 32140 - protein, 106 aa, Glycine max
  unsure (1)..(106): unsure at all Xaa locations
  Clone ID: TF_GmC54821_5.pep
IESMARMGPGFRFHPTDEELVVFYLKRKMTGNLSRYDHIAVVDVYKLEPWDLPSLSKLKTKDLEWYFFSALDRKYGNGSRTNRATERGYWKTTGKDRXVTHGERTV

SEQ ID NO: 32141 - protein, 300 aa, Glycine max
  Clone ID: TF_GmC195_2.pep
MASELQLPPGFRFHPTDQELVLHYLCRKCASQPIAVPIIAEIDLYKYDPWDLPGLASYGEKEWYFFSPRDRKYPNGSRPNRAAGTGYWKATGADKPIGHPKPVGIKKALVFYAGKAPKGDKSNWIMHEYRLADVDRSVRKKNSLRLDDWVLCRIYNKKGTIEKFQPSSDVVVSRKMESSEIEDRKPEILKSGGGCLLPPVPPPQAKAAVKTDYMYFDPSDSIPKLHTDSSCSEHVVSPEFASEVQSEPKWKEWEKSLEFPFNYVDATLNNSNSFTTQFQGNNQMMSPLQDMFMYWPNKPF

SEQ ID NO: 32142 - protein, 343 aa, Glycine max
  Clone ID: TF_GmC424_3.pep
MGVPEKDPLSQLSLPPGFRFYPTDEELLVQYLCRKVAGHHFSLPIIAEIDLYKFDPWVLPSKAIFGEKEWYFFSPRDRKYPNGSRPNRVAGSGYWKATGTDKIITTEGRKVGIKKALVFYVGKAPKGTKTNWIMHEYRLLDSSRKNTGTKLDDWVLCRIYKKNSSAQKTAQNGVVPSNEHTQYSNGSSSSSSSQLEDVLESLPSIDERCFAMPRVNTLQQQQHHEEKVNVQNLGAGGLMDWTNPSVLNSVADFASGNNQVVQDQTQGMVNYNCNDLYVPTLCHLDSSVPLKMEEEVQSGVRNQRVGNNNSWFLQNDFTQGFQNSVDTCGFKYPVQPVGFGFRN

SEQ ID NO: 32143 - protein, 465 aa, Glycine max
  Clone ID: TF_GmC834_1.pep
MGRETMCLPTPPTTATTTVNPVPPPAPAPPTSLAPGFRFHPTDEELVIYYLKRKVSGKSFRFDAISEVDIYRSEPWDLADKSRLKTRDQEWYFFSALDKKYGNGGRMNRATSKGYWKATGNDRPVRHDQRTVGLKKTLVFHSGRAPDGKRTNWVMHEYRLVEEELERAGSGSSQPQDAYVLCRVFHKNNIGPPNGQRYAPFIEEEWDDASGMVPGADPGDNRSFAHQPHVEGKGGVLCAEGRNGAVQDTQSFNKAPFDVNKLPIETQNLLAVCKRESMAEYPSPEKDDNNCKHMDDYPSPQTDNPKPFSQIYKRRRHNLNSNNSHVSGDSIRTSQDPCSSTITTAATALPTTNAAAGTATNTAPKKHFLSALVEFSLLESLESKDSLASIKTPDFDVENLESSMPPSCAKFIKEMKSEMQKLSVEKETMRFEMMSTQAMINILQSRVDVLSKENEDLKRMVAQNP

SEQ ID NO: 32144 - protein, 354 aa, Glycine max
  unsure (1)..(354): unsure at all Xaa locations
  Clone ID: TF_GmC1311_2.pep
MDSSSSGSQLSQHPQLPPGFRFYPTDEELVVHYLKRKADSVPLPVSIIAEVDLYKFDPWELPSKATFGDQEWYFFSPRDRKYPNGSRPNRAASSGYWKATGTDKPILASHGHHHKVGVKKSLVFYGGKPPKGVKTNWIMHEYRLADSNSNSSSKPPSMASDHAQSCKKNSLRLDDWVLCRIYKKSNSTNLPRLPLVEQNKELSMLPMRSTLSMANNNTSQDSKPTSSISTSYGPLGVENDDNLFDGILGVDHQSMXHDVSDSQQVSSKGNFPMKRELSSQYFWNDTGSSSSSRRFHCDLNYAGSSTVEEDNSFVSLLSHLSQNTTSFHPNALLGPIGNGVLRQQFQLPSMNWNT

SEQ ID NO: 32145 - protein, 179 aa, Glycine max
  Clone ID: TF_GmC7703_4.pep
FACWVWGVLVVDLSVVRNKDPEWFFFCPQDRKYPNGHRLNRATNHGYWKATGKDRKIKSGTILIGMKKTLVFYTGRAPKGNRTNWVMHEYRPTLKELDGTNPGQNPYVLCRLFKKHDESLEVSHCDEAEPTASTPVAAYYSTEEIQSDLAVVAGSPSQVTEDDKHQSMIPAHSEEAISN

SEQ ID NO: 32146 - protein, 216 aa, Glycine max
  unsure (1)..(216): unsure at all Xaa locations
  Clone ID: TF_700736976_FLI.pep
MEKVNFVKNGELRLPPGFRFHPTDEELVLQYLKRKVFSCPLPASIIPELHVCKXLEQERYFFSTKVAKYPNGNRSNRATNSGYWKATGLDKQIVTSKGNNQVVGMKKTLVFYRGKPPNGSRTDWIMHEYRLILNASQSQSHVVPMENWVLCRIFLKRRIGAKNGEESNSKVVFYDFLAQNKTDSSSSVASGITHESDEHEESSSSNTFPYTIRRKP

SEQ ID NO: 32147 - protein, 244 aa, Glycine max
  Clone ID: TF_GmC416_1.pep
MDDLPPGFRFYPTEEELVFFYLHNQLEGQIHDTSRVIPVIDINGVEPWNLPSLAGELCRGDTEQWFFFSPRQEREARGGRPNRTTASGYWKATGSPGHVYSSDNKVIGMKKTMVFYKGKAPTGRKTKWKMHEYKAIEHSDQSNTAPPKLRHEFSLCRVYVISGSFRSFDRRPLDMPRVELRVVDGDRGAASTSAQAQQRSSSHTSHSGGDAHVTDAGAGSSGTNWNASNRVEEPLWEWEQLDWP

SEQ ID NO: 32148 - protein, 275 aa, Glycine max
  unsure (1)..(275): unsure at all Xaa locations
  Clone ID: TF_GmC525_1.pep
MEKVNFVKNGELRLPPGFRFHPTDEELVLQYLKRKVFSCPLPASIIPELHVCKSDPWDLPGDLEQERYFFSTKVAKYPNGNRSNRATNSGYWKATGLDKQIVTSKGNNQVVGXKKTLVFYRGKPPNGSRTDWIMHEYRLILCLSATGLDKQIVTSKGNNQVVGMKKTLVFYRGKPPNGSRTDWIMHEYRLILNASQSQSHVVPMENWVLCRIFLKRRIGAKNGEESNSKVVFYDFLAQNKTDSSSSVASGITHESDEHEESSSSNTFPYTIRRKP

SEQ ID NO: 32149 - protein, 115 aa, Glycine max
  unsure (1)..(115): unsure at all Xaa locations
  Clone ID: TF_uC-gmropic111g01b1.pep
TTRSSDYRGKEWGFFSPRDRKYPDGSXRPNRVAGSGYWNVTGSRGIITTEGRNVGIKKAFVFYGGKAPKGTKTNWIMHEYRLLNCSRKNTGTKVYSYTYTHAHTLLLNGLTPSIN

SEQ ID NO: 32150 - protein, 98 aa, Glycine max
  Clone ID: TF_GmC580_6.pep
MGSVDCYPSRVDDAAVVSLDSLPLGFRFRPTDEELVNYYLRQKINGNGREDWVIREIDVCKWEPWDMPGLSVVQTKDPEWFFFCPQDRKYPNGHRMNR

SEQ ID NO: 32151 - protein, 307 aa, Glycine max
  Clone ID: TF_700954809_FLI.pep
ELPAMASFGAEEWYFFSPRERKYPNGARPNRAATSGYWKATGTDKPICSGTQKVGVKKSLVFYGGKPPKGVKTDWIMHEYRVAENKPNNRPPGCDLGHKKNSLRLDDWVLCRIYKKGNTQRSHERDDSMDDMIGEVPPSINVGHMNARFHLSKMSTSYSGALLENDRNTLEGVVIGNGNVNGINTNSINAISSSSSHHQFASSNSKAELLPFAPSNNNTSNSASKRTLSSLYWNVDDDNDDDDHKHFNLDSNGNVSVLRTEENNNNTNGTSGSFATLLNQLPQTPSLPQIDGLLRTPYQIQGTNWYG

SEQ ID NO: 32152 - protein, 357 aa, Glycine max
  Clone ID: TF_22597157.pep
MENVSVLLCNKEKDQMDLPPGFRFHPTDEELISHYLYRKVTDTNFSARAIGEVDLNRSEPWDLPWKAKMGEKEWYFFCVRDRKYPTGLRTNRATESGYWKATGKDKEIFRGKSLVGMKKTLVFYKGRAPKGEKTDWVMHEYRLDGKFSFHTLPKTAKNEWVICRVFQKSSGVKRTHISGMMMLDSYGNEMVYSSSALPPLTDSSPSIGNNTKALSVTDSAYVPCFSNPIDVPRGIFDSLNNINISINSNTLYGVSSNHSFYNTQGVQLQAPPTLPLPSSSNHYLRAFLENQGNGSNMSNNGFEPEREMVSVSQKTSLSTDVKAEISSLGKRHFENQNNPIASAAAVAPMDLATLWNY

SEQ ID NO: 32153 - protein, 214 aa, Glycine max
  Clone ID: TF_GmC119269_1.pep
MAPVLPPGFRFHPTDEELVAYYLKRKINGRKIELEIIPEVDLYKCEPWDLPGKSLLPGKDLEWYFFSPRDRKYPNGSRTNRATKSGYWKATGKDRKVNSQARAVGMKKTLVYYRGRAPHGSRTNWVMHEYRLDERECETNSGLQDAYALCRVVKKTAVIPPKVGGHYVNVPNANKITSDQSSSIELYSEGRHEDLDSSNYLMSMDICSPCNMGN

SEQ ID NO: 32154 - protein, 357 aa, Glycine max
  Clone ID: TF_GmC500_1.pep
MENVSVLLCNKEKDQMDLPPGFRFHPTDEELISHYLYRKVTDTNFSARAIGEVDLNRSEPWDLPWKAKMGEKEWYFFCVRDRKYPTGLRTNRATESGYWKATGKDKEIFRGKSLVGMKKTLVFYKGRAPKGEKTDWVMHEYRLDGKFSFHNLPKTAKNEWVICRVFQKSSGVKRTHISGMMMLDSYGNEMVYSSSALPPLTDSSPSIGNNTKALSVTDSAYVPCFSNPIDVPRGIFDSLNNINISINSNTLYGVSSNHSFYNTQGVQLQAPPTLPLPSSSNHYLRAFLENQGNGSNMSNNGFEPEREMVSVSQKTSLSTDVKAEISSLGKRHFENQNNPIASAAAVAPMDLATLWNY

SEQ ID NO: 32155 - protein, 62 aa, Glycine max
  Clone ID: TF_uC-gmflpic081d07b1.pep
MGVPERDPLAQLSLPPGFRFYPTDEELLVQYLCRKVAGHHFSLPIIAEVDLYKFDPWVLPGN

SEQ ID NO: 32156 - protein, 419 aa, Glycine max
  unsure (1)..(419): unsure at all Xaa locations
  Clone ID: TF_GmC44609_1.pep
MAKPKMPGFRFQPTDVELIEYFLKRKVRGKKFPSEMIAELDLYXFAPLDLPDMSLLKNGDLNXDFVCPRGKKYSTGGXIGVMHEFRLDDKVLADEGXCRVYQKEGPGPRNGAQYGKPYEEKEWETDEEIDSVQSAPVAAVCAPVPIQPSESHISVANYIHPSTSGCAGLTSVSCVSELMPSCSTHPSAPSNPVGTVSCVSELIPSCSEPHHLPSNNQVGSVSCVSEFMPSCSAHPLAPNNQVDSVPCVSEFMPSCSAHPSAPNSQVGSVSGLIPSFLAHSSASNNQVGSVPCVPELVPSCLAHPSAPNNQADVGILPFLDCSIEDDDTLAVNENNSIENVDDPDQANNAERGPCSDPNAIFEELGDLNSLVGLGEGSFSCGQKNEYTTSEMLYTVDIFGSCDHDFLELIDLETPHALAE

SEQ ID NO: 32157 - protein, 195 aa, Glycine max
  Clone ID: TF_GmC518857_1.pep
MVPRVRPCVRFPMAGPSWLVDKSRIATKIKSASGTCGKVIWKSNPSRACPSCHHVIDNSDVAQEWPGLPIGVKFDPSDQEIIWHLLAKVGAGNSKPHPFIDEFITTLEVDDGICYTHPQHLPGVKQDGSSSHFFHRVINAYNTDSRKRRTICGQDLGDVRCHKTGRTKPVILNAIQKGCKKIMALYISPVRGRKS

SEQ ID NO: 32158 - protein, 220 aa, Glycine max
  Clone ID: TF_GmC1902_1.pep
MGRFENHVVKGGIKLPIGFRFCPTDEELLLHYLKKKAFAQQLPASVISEFDVFQTEPWKLPGELRENRYFFSNRSNGNIKRPAGSGCWKSVGKEKQIIHSESNQVIGMKETLFFCKGSHETRTQWVMHELRLVASYPCQMPVADFAVYRIFQKNKMKTRRSHGKKPSSSSKLQRLVDVKASFFDFTVDFNHDDIGPPTPFFPTAASFVFSWLLLSLDFSH

SEQ ID NO: 32159 - protein, 226 aa, Glycine max
  Clone ID: TF_GmC407_1.pep
FDPTDQEILEHLEAKVRSDIHKLHPLIDEFIPTLEGENGICCTHPEKLPGVSKDGLIRHFFHRPSKAYTTGTRKRRKVHTDADGSETRWHKTGKTRPVFISGKLKGYKKILVLYTNYRKQRKPEKTNWVMHQYHLGNNEEEKEGELVVSKVFYQTQPRQCGSLMKDSYPAKLKGEGVHEVTNHKNTGYVEYYNNSFVSFDQGDQHRSSTAQLVSHFPVHGGATFIP

SEQ ID NO: 32160 - protein, 221 aa, Glycine max
  unsure (1)..(221): unsure at all Xaa locations
  Clone ID: TF_GmC195_1.pep
MASELQLPPGFRFHPTDQELVLHYLCRKCASQPIAVPIIAEIDLYKYDPWDLPGLASYGEKEWYFFSPRDRKYPNGSSAEPGGGNRDLWKATGADKPIGHPKPVGIKKALVFYAGKAPKGDKSNWIMHEYRLXADVDRSVRKKXHPKGLDDWXLLCRIYNKKGTIEKHGSNRRSTLYSRNMRSSASEPNGRVGEKPRVSFNSCMPPNTRTASRRSSRAIIR

SEQ ID NO: 32161 - protein, 305 aa, Glycine max
  Clone ID: TF_GmC7703_2.pep
MGAVVECYPPPRTAVLSLNTLPLGFRFRPTDEELIDYYLRSKINGNSDDVWVIREIDVCKWEPWDLPDLSVVRNKDPEWFFFCPQDRKYPNGHRLNRATNHGYWKATGKDRKIKSGSTLIGMKKTLVFYTGRAPKGKRTNWVMHEYRPTLKELEGTNPGQNPYVLCRLFKKQDESLEASNGDDVERTASTPTTANYCPDEIQSDSALVPASSSQVTEDDKPLPVISENSEEAISNIITPGDIHSDECDASDAQYQIVEPIAKEDQLPNVDIFYDPTNQQLDDKLFSPVHAHFPADFYYQANNQSE

SEQ ID NO: 32162 - protein, 172 aa, Glycine max
  Clone ID: TF_GmC195_4.pep
MASELELPPGFRFHPTDEELVLHYLCRKCASQPIAVPIIAEIDLYKYDPWDLPGLATYGEKEWYFFSPRDRKYPNGSRPNRAAGTGYWKATGADKPIGQPKPVGIKKALVFYAGKAPKGDKSNWIMHEYRLADVDRSVRKKNTLRLDDWVLCRIYNKKGTIEKLQPSKRCCS

SEQ ID NO: 32163 - protein, 156 aa, Glycine max
  Clone ID: TF_GmC14820_2.pep
MENRTSSVLPPGFRFHPTDEELIVYYLCNQASSRPCPASIIPEVDIYKFDPWELPDKTDFGEKEWYFFSPRERKYPNGVRPNRATVSGYWKATGTDKAIYSGSKHVGVKKALVFYKGKPPKGLKTDWIMHEYRLIGSRRQANRQVGSMRVSLCLTC

SEQ ID NO: 32164 - protein, 337 aa, Glycine max
  Clone ID: TF_GmC473_1.pep
MGVPERDPLAQLSLPPGFRFYPTDEELLVQYLCRKVAGHHFSLPIIAEVDLYKFDPWVLPGKAVFGEKEWYFFSPRDRKYPNGSRPNRVAGSGYWKATGTDKIITTEGRKVGIKKALVFYIGKAPKGSKTNWIMHEYRLLDSSRKHNLGTAKLDDWVLCRIYKKNSSSQKVEANFLAMECSNGSSPSSSSHVDDMLGSLPEINDRCFTLPRVNSLRTMHQQDEKFGSPNMGSGFFSDWVNSTDLDSISEFESGCQTQRMVNYDCNDFFVPSLPPLGHVDYMVDAPLEEEVQSGVRTRRVDGPGHFQPNPDTRLLPGSGDPFGFGFIMGQQVGFGVRE

SEQ ID NO: 32165 - protein, 375 aa, Glycine max
  Clone ID: TF_GmC499_1.pep
MGSTDSSSGSQQPNLPPGFRFHPTDEELVVHYLKKKTASAPLPVAIIAEVDLYKFDPWELPAKAAFGEQEWYFFTPRDRKYPNGARPNRAATSGYWKATGTDKPVLTSGGTQKVGVKKALVFYGGKPPRGIKTNWIMHEYRLTDNKPNNRPPPGCDLGNKKNTLRLDDWVLCRIYKKSNTHRSPMEHDREDSMDDMIGGIPPSINVGHMSARFHHLSKMTTAYNNGALLENDHHNLLEGMMIGNSNGGMNTTTTTTPGPMSSHLGGSKEELSFVPTMTHSSNTSKRTLSSLYWNDEDVAGTSSSNKRFNLELSGDNNNHGSVVRDDQENGTASSIATLLNQLPQTPSLHQQSILGSIGDGLLRTTYQIPGMNWYA

SEQ ID NO: 32166 - protein, 150 aa, Glycine max
  unsure (1)..(150): unsure at all Xaa locations
  Clone ID: TF_GmC424_7.pep
MGVPEKDPLSQLSLPPGFRFYPTDEELLVQYLCRKVAGHHFSLPIIAEIDLYKFDPWVLPIKRFSXEKEWYFFSPRDRKYPNGSRPNRVAGSGYWKATGTDKIITTEGRKVGIKKALVFYXGQCPKGTNTIWTMHEYRLPSLPKEPWPQT

SEQ ID NO: 32167 - protein, 154 aa, Glycine max
  unsure (1)..(154): unsure at all Xaa locations
  Clone ID: TF_GmC79805_1.pep
MEGSTTSSELPPGFRFHPTDEELIVYYLCNQATSKPCPASIIPEVDLYKFDPWELPDXTEFGENEWYFFSPRDRKYPNGVRPNRATVSGYWKATGTDKAIYSGSKHVGVKKSLVFYKGRPPKGAKTDWIMHEYRLAESKIPSSRKIGSMRHQYW

SEQ ID NO: 32168 - protein, 259 aa, Glycine max
  Clone ID: TF_GmC54821_1.pep
MARMGPGFRFHPTDEELVVFYLKRKMTGNLSRYDHIAVVDVYKLEPWDLPPLSKLKTKDLEWYFFSALDRKYGNGSRTNRATDRGYWKTTGKDRPVTHGDRTVGMKKTLVYHSGRAPQGRRTNWVMHEYKMLDDELARSGTVLDVFVVCRIFEKSGSGPKNGAKYGAPLDEKEWDVEDGTRMKRMSRRRWLPCSFLIMRWLLLLPCRRLLIMWWLILLCWRRLLIIIIWWLLLLLPCRLLLMGPMFQPTTLTWNLIGVV

SEQ ID NO: 32169 - protein, 295 aa, Glycine max
  Clone ID: TF_GmC625_21.pep
MKGELELPPGFRFHPTDEELVNHYLCRKCAGQPIAVPIIKEVDLYKFDPWQLPEIGYYGEKEWYFFSPRDRKYPNGSRPNRAAGSGYWKATGADKAIGKPKALGIKKALVFYAGKAPKGVKTNWIMHEYRLANVDRSASKKNNNNLRLDDWVLCRIYNKKGKIEKYNTTAPKMNLEMIHSFEHENETKPEIHKLGNEQLLYTETSDSVPRLHTDSSSSEHVVSPDVRCEREVQSDPKWNNDDYDLGLQLENAFDFQFNYLDDNNLSVDDDPFGTVQYQMGQLSPLQDMFMYLQKM

SEQ ID NO: 32170 - protein, 291 aa, Glycine max
  Clone ID: TF_GmC625_20.pep
MKGELELPPGFRFHPTDEELVNHYLCRKCAGQPIAVPVIKEVDLYKFDPWQLPEIGFYGEKEWYFFSPRDRKYPNGSRPNRAAGSGYWKATGADKPIGKPKALGIKKALVFYAGKAPKGVKTNWIMHEYRLANVDRSASKKKNNNLRLDDWVLCRIYNKKGKIEKYNTGAAKMNVEMVHSFEHENETKPEIHKLGNEQLYMETSDSVPRLNTDSSSSEHVVSPDVTCEREVQSDPKWNDDLDLKLENAFDFQFNYLDDNNLSVDDYLFGTVQYQMGQLSPLQDMFMYLQKM

SEQ ID NO: 32171 - protein, 123 aa, Glycine max
  Clone ID: TF_GmC705867_1.pep
RVRAPQGIRTDWVMHEYRLDDKECEDTTGLQDTYALCRVFKKNGICSDIEEQGQCNISLIESSQTIINECETMSPDIPGASSSCLEEEDKDDSWMQFITEDAWYSSNAAMVGSEEVSHVTFTN

SEQ ID NO: 32172 - protein, 216 aa, Glycine max
  Clone ID: TF_GmC2540_9.pep
MEVLNPIEGKTYKLPVGYRFDPSDEILAGYYLRKRIMAQPSPNDLIQDCDVYQTVPWELPGGGSKNLNWQRFFFHDLRTRVFENLNKREAGNGQWRTIEKAQDFELSKEQVVARKNVLAFWEAKGNGFAKSNWVMHEFRLVSKSHPSMVSAMAVYRIFKTKKEGRKGKKAKRSEGETSSSSSSEEEAMDETPIVIDFTMENGTVTGPPSPATSEAS

SEQ ID NO: 32173 - protein, 296 aa, Glycine max
  Clone ID: TF_GmC5673_1.pep
MGLRDIGASLPPGFRFYPSDEELVCHYLYKKIANEEVLKGTLVEIDLACAIILMHAEVAKLNANEWYFFSFRDRKYATGFRTNRATTSGYWKATGKDRKVEDPATQEVVGMRKTLVFYRNRAPNGIKTGWIMHEFRLETPHMPPKEDWVLCRVFHKSKEDDNSSKLLQYETTPSSLTLLASSSPTNQAMPHGVGYNNRLATSFSNSFMPTHQYHHHFNPTQNANSLMDLLHFSRETNTNNTGFLTQIGAKGDDEYGFLWDMDLEENSLDDGVASNLDAIRFEVDNNNTNNNNMVLL

SEQ ID NO: 32174 - protein, 65 aa, Glycine max
  Clone ID: TF_LIB5119-023-A1-PF1-B5.pep
MEENLPPGFRFHPTDEELITCYLTRKVYDSSFTSKAIAVVDLNKCEPWDLPGSLRALSSTLFLLL

SEQ ID NO: 32175 - protein, 220 aa, Glycine max
  unsure (1)..(220): unsure at all Xaa locations
  Clone ID: TF_LIB4392-037-R1-K1-F9.pep
MESMESCVPPGFRFHPTDEELVGYYLRKKVFFXKIDLDVIREIDLYRIEPWDLQERCRIGYEEQNEWYFFSHKDKKYPTGTRTNRATMAGFWKATGRDKAVYERAKLIGMRKTLVFYKGRAPNGQKSDWIMHEYRLESDENGPPQEEGWVVCRAFKKKTTGQTKTINIEGWESSYFYDEASGATSTLVDPIELISRQSQSFLAHNFMCKQELEADNLTCM

SEQ ID NO: 32176 - protein, 358 aa, Glycine max
  Clone ID: TF_GmC1208_1.pep
MQAMENIHQREILEEQRFELPPGFRFHPTDEELITHYLSQKVLDSCFCARAIGEADLNKCEPWDLPWMAKMGEKEWYFFCVRDRKYPTGQRTNRATGVGYWKATGKDREIYKAKALIGMKKTLVFYKGRAPSGEKTSWVMHEYRLEDEHSVHNPPKKAMNDWAICRIFQKSNGGKKMPISGLVRFSNFAKDMPSLMDSSPYNDSESKPVLGESSQPTCFSDPNQSEDQRTQDENIADSYETLMLASSYSSNPSDISPASWTFSKSAPTVSHQSLQVGNSHSSDYFMLHQEQSMLGMLIENHGASAGQRTQKAQDSKGSDADMSSVMYNNYEMFQRSFGNQEYSSPSVGHVYSSGLWGF

SEQ ID NO: 32177 - protein, 60 aa, Glycine max
  Clone ID: TF_LIB3242-501-P1-J1-E5.pep
AGSADCFSQMMSSMPGFCFHPTDEELVMYYLKRKICGKRLKLDVIHETDVYKWDPEDLPG

SEQ ID NO: 32178 - protein, 120 aa, Glycine max
  Clone ID: TF_uC-gmropic088h01b1.pep
NGRNLKPGGNSSSDAILLRYISLPSYRFHPTDEELVLHYLCRKCASQPIAVPIIAEIDLYKYDPWDLPGLATYGEKEWYFFSPRDRKYPNGSRPNRAAGTGYWKATRADSPLVKPTGWDK

SEQ ID NO: 32179 - protein, 242 aa, Glycine max
  Clone ID: TF_701123582_FLI.pep
DLPPGFRFYPTEEELVFFYLHNQLEGQIHDTSRVIPVIDINGVEPWNLPSLAGELCRGDTEQWFFFSPRQEREARGGRPNRTTASGYWKATGSPGHVYSSDNKVIGMKKTMVFYKGKAPTGRKTKWKMHEYKAIEHSDQSNTAPPKLRHEFSLCRVYVISGSFRSFDRRPLDMPRVELRVVDGDRGAASTSAQAQQRSSSHTSHSGGDAHVTDAGAGSSGTNWNASNRVEEPLWEWEQLDWP

SEQ ID NO: 32180 - protein, 304 aa, Glycine max
  Clone ID: TF_GmC5683_1.pep
MNVKVHSSDDTKKDEEVVLPGFRFHPTDEELVGFYLQRKVDKKPLKIELIKQVDIYKYDPWDLPKVNSFGDKEWYFFCIRGRKYRNSVRPNRVTRSGFWKATGIDKSIYCVKEPHECIGLKKSLVYYRGSAGKGTKTDWMMHEFRLPPNAKSSPNDVQEAEVWTLCRIFKRIPSFKKYAPNLKDSTPATKPNPVNSNASTLDSDNCCKPYLICRDPMMMQQIERKPVIGQVDEKKHLFLGQFGPLSHLQAPSTTPYPNFWNQNNVEDHAFANENWDDLRSVVQFAIDPSTVFDCTETYIPPYFS

SEQ ID NO: 32181 - protein, 364 aa, Glycine max
  Clone ID: TF_GmC389_1.pep
MGSIENASKPRKENPKFELPAGFRFHPTDEELINQYLTKKVVDNCFCAIAIGEVDLNKCEPWDLPGLAKMGETEWYFFCVRDRKFPTGIRTNRATDIGYWKATGKDKEIIMENALIGMKKTLVFYKGRAPKGEKTNWVMHEYRLEGKHNQPPPAKSEWVICRVFEKSRCGKKMHVPKCGRFNNPFGEEPSSGASLLPPLMDSSPYNSETRTTTAGELSQVTCFSDPNQTEDQNNTHDDIVDSMETPILNFSPFSRPDDASTLAKATLSSASNQSAQIAHQIGDSQFPDYCYAPQEPSMLRMLMENHEPCAKQTQKEEFPEGRDFDGDISSMIYSSDMINRMFGNQEHSSSASAGPVDTDFLWNY

SEQ ID NO: 32182 - protein, 65 aa, Glycine max
  Clone ID: TF_LIB3242-161-Q1-J1-A7.pep
LAAHYLLTTINSLRNDLHVIVEMDLYKTYPCDIHDTSELCYDLKNEWYFFIHKDTICATRTRTNK

SEQ ID NO: 32183 - protein, 108 aa, Glycine max
  unsure (1)..(108): unsure at all Xaa locations
  Clone ID: TF_LIB3092-046-Q1-K1-D7.pep
TPPGFRFYLTDXELVNHYLRRKCADQPISVPIIKXVDLYKIYSWHLPQIDYYCXKEWYFFSSRDQKYSNGSRPXNRAILSGYWXKLTRADKPXGNTKALGIQXALVFY

SEQ ID NO: 32184 - protein, 279 aa, Glycine max
  Clone ID: TF_GmC388_1.pep
MEDHAHAALPPGYRFYPSEEVLVGYYLTKKNENREEGFYGSDLIRELDLYDHDPFELPDAAACFSYGYKGRKKHWFCYAKETKRRNRRKVKSGFWLRKGKVRDISDHNGDDVVLGTRTRFVFYVGNSLKNAARTDWILYEYALVDRFLASFVLCRVVNKPPHKNSPSEIGLSCCAEESVVAVVRHVGVQCDGCAESDVVEAKVCDEGFVNRENEIAENPISGEHGDPAAPVSVAQGSHQVQERLSKLPSGSALFVGAMTSQQLMLSILEEDFIELDDIA

SEQ ID NO: 32185 - protein, 201 aa, Glycine max
  Clone ID: TF_GmC572_1.pep
MEDGSVNLPPGFFFSPTDEELVLHFLYCKASLIPCHPNIIPDLHPSQLAPWELNGKALLSGNQYYFFTKVNENRARENGYWKDTGVTEPILSTFDKKVGMKKYLVFHIGEAPQGTETSWVMQEYYICSSGFDTASYRSARRRRKHDQSWSKWVLCKVYEKIRSQQGVNCYSDDDDSGSELSWLDEVYLSLDDDLEEIGMPI

SEQ ID NO: 32186 - protein, 137 aa, Glycine max
  unsure (1)..(137): unsure at all Xaa locations
  Clone ID: TF_GmC473_3.pep
MGVPERDPLAQLSLPPGFRFYPTDEELLVQYLCRKVAGHHFSLPIIAEVDLYKFDPWVLPGKAAFGEKEWYFFSPRDRKYPNGSRPNRVAGSGYWKATGTXQIITTEGRKVGIKKALVFYVGKAPKGSKTHWIMHEY

SEQ ID NO: 32187 - protein, 136 aa, Glycine max
  unsure (1)..(136): unsure at all Xaa locations
  Clone ID: TF_GmC195_5.pep
MASELELPPGFRFHPTDEELVLHYLCRKCASQPIAVPIIAEIDLYKYDPWDLPGLATYGEKEWYFFSPRDRKYPNGSRPNRAAGTGYWKATGADKPIGQPKPVGIKKALVFYAGKAPKGDKXSNWIMHEYRLADVD

SEQ ID NO: 32188 - protein, 365 aa, Glycine max
  Clone ID: TF_GmC160_1.pep
MESTEDSSTSSQQQPNLPPGFRFHPTDEELVVHYLKKKVDSVPLPVSIIADVDLYKFDPWELPAMASFGAEEWYFFSPRERKYPNGARPNRAATSGYWKATGTDKPICSGTQKVGVKKSLVFYGGKPPKGVKTDWIMHEYRVTENKPNNRPPGCDLGHKKNSLRLDDWVLCRIYKKGNTQRSHERDDSMDDMIGEVPPSINVGHMSARFHLSKMSTSYSGALLENDRNTLEGVVIGNGSVNGISNTNNITSVISSSHQFGTSNSKAELLPFVPSNNTSNSASKRTLSSLYWNVDDDNDDDDHKHFNLDSNGNVSVLRTEENNNNTNGTSGSFATLLNQLPQTPSLPQIDGLLRTPYQIQGTNWYG

SEQ ID NO: 32189 - protein, 123 aa, Glycine max
  unsure (1)..(123): unsure at all Xaa locations
  Clone ID: TF_jC-gmfl02220079g06a1.pep
MDDDIVGLGFRPTEEELVDFYLKHMLLGNDPRAHVIPVIDLCDVEPWDVPXPVDFKYSRSKRFNRTTKCGFWKATGKDRDIRTGDTNTVIGTKKTLVYYQSRVSCGVKSNWVIHEYHAVTFHE

SEQ ID NO: 32190 - protein, 193 aa, Glycine max
  Clone ID: TF_GmC434_3.pep
MDDIVGYGFRPTDEELVKFYLKHKLLDDDPCVHFILDVDLCEVEPWDLPLLLADSAVRFNGREWFFFSPVDYKYSNSKRVNRTTKCGFWKPTGKDRGIRSKDTNNVIGTKKTLVYYQGRVSSGVKSNWVIHEYHAVTFHESQRTFVLCRLMKKPGKTTEGGTDALICDEGGPSRSMVSDYENQATTQGIPSVS

SEQ ID NO: 32191 - protein, 189 aa, Glycine max
  Clone ID: TF_GmC36703_1.pep
MGDNNVNLPPGFRFYPTDEELVVHFLQRKANLLPCHPDVIPDLELYPYDPWELHGRALAEGKQWYYYSRRTQNRVTSNGYWMPMGMEEPVISNSSNKRVGMKKYYVFHLGEAPDGNTTNWIMQEYRLLDSASSSISSRRRSQPKPDHNKWVICRVYEQDNDDDGDGTELSCLDEVFLSLDDLEEISLPN

SEQ ID NO: 32192 - protein, 332 aa, Glycine max
  Clone ID: TF_GmC560_1.pep
MESCVPPGFRFHPTEDELVGYYLKRKINSLKIDLDVIVEIDLYKMEPWDIQDRCKLGYEQQNEWYFFSHKDKKYPTGTRTNRATAAGFWKATGRDKAVMSKNRIIGMRKTLVFYKGRAPNGRKTDWIMHEYRHQTSEHGPPQEEGWVVCRAFRKPSPSHRPGFDHPWCSTSSQQQHFFRDQIQSYSSRPLSIADILDETNNVPHPNAEGTSFSHPFSSDHQQHLNNLLSNQTVAIMDKQLIELPQLDSPTASLAIKECNQQQHNGLTNEEYCSDERSNNSNAQGIDWKSLDNLFGSQLSDNAAYFSHPNLPLMMPHNHDQASHILGCFPDSS

SEQ ID NO: 32193 - protein, 340 aa, Glycine max
  Clone ID: TF_GmC473_2.pep
MGVPERDPLAQLSLPPGFRFYPTDEELLVQYLCRKVAGHHFSLPIIAEVDLYKFDPWVLPGKAAFGEKEWYFFSPRDRKYPNGSRPNRVAGSGYWKATGTDKIITTEGRKVGIKKALVFYVGKAPKGSKTNWIMHEYRLLDSSRKHNLGTAKLDDWVLCRIYKKNSSAQKVEANLLAMECSNGSSPSSSSHVDDMLESLPEIDDRCFTLPRVNSVRTMQQQDEKFGFQNMGSGFFTDWVNPTDLDSVSEFGSGCQTQGMVNYDCNDLFVPSVPPFGHSHVNYMVGAPPSEEEVQSGVRTQQADGAACFQQNPNARLLPGSGDPFGFGFIMGQQVEFGFRD

SEQ ID NO: 32194 - protein, 314 aa, Glycine max
  unsure (1)..(314): unsure at all Xaa locations
  Clone ID: TF_701130443_FLI.pep
MDDDIVGLGFRPTEQELVNFYLKHKLLGDDPRVHVIPVIDLCDVEPWNVPXPVDFKYLKSKRFNRTTKCGFWKATGKDRDIRTGDTDNTVIGTKKTLVYYQGRVSCGVKSNWVIHEYHAVTFHENQRTFVLCCLMKKPGKTTEGGTDPLICDEGEPSRSMISDYENQPTAEGIASEGTFTGIEAIFQATPWAENCFSPIQQSLTLIEQEGASFPNYAFNNAYFRNEDNIMQTPFETTKEDEFLNLILADESIVINEENKHDFVNSSTQSESLKRVYCESSDTDAEVISKLVKIYQVQIILGRVSPFVSEVALDL

SEQ ID NO: 32195 - protein, 302 aa, Glycine max
  Clone ID: TF_GmC1823_1.pep
MINMATMEDMSNMSGEITLPGFRFHPTEEELLDFYLKNMVVGKKLRYDVIGFLNIYQHDPWDLPGLAKVGEREWYFFVPRDKKHGSGGRPNRTTEKGFWKATGSDRKIVTLSDPKRIIGLRKTLVFYQGRAPRGCKTDWVMNEYRLPDNCKLPKEIVLCKIYRKATSLKVLEQRAALEEEREKKQMVDNSPASPPSSTDTMSFSSPQEEQNVPLPLLQHVLKKESETTEDMVVSKQEKTTNQLTLKDTKSTCGTSLQMPFGKEKLPDLQLPMLSDWTQDTFWAQLNSPWLQNFTPTNILNFY

SEQ ID NO: 32196 - protein, 205 aa, Glycine max
  Clone ID: TF_GmC1823_2.pep
MATMEDMNNMSGEITLPGFRFHPTEEELLDFYLKNMVVGKKLRYDVIGFLNIYQHDPWDLPGLAKVGEREWYFFVPRDKKHGSGGRPNRTTEKGFWKATGSDRKIVTLSDPKRIIGLRKTLVFYQGRAPRGCKTDWVMNEYRLPDNCKLPKEIVLCKIYRKATSLKGLEQRAALEEEREMKMVGSPASFTDTMFSSPQEEQTCPC

SEQ ID NO: 32197 - protein, 324 aa, Glycine max
  Clone ID: TF_GmC1395_1.pep
MEENLPPGFRFHPTDEELITCYLTRKVSDSSFTSKAIAVVDLNKCEPWDLPGKASMGKKEWYFFSLRDRKYPTGLRTNRATESGYWKTTGKDKEIFRAGVLVGMKKTLVFYRGRAPRGEKSNWVMHEYRLENKHHFGPSKDEWVVCRVFQKSLQVKRPQQTPSSQPESPCDTASMVNEFGDVELPNLINNIANSSGGLTNNISGQTCFNADLINSVNTNMNLAMNWPVASEVIQVPTLPSLPWPSGLLNPSISVNSLLLKALQLRSYQQREAATDHLIASYVPQGVSHVGTDLSSNLTASSSKVLECMPQQQQLEQPFNLDSIW

SEQ ID NO: 32198 - protein, 174 aa, Glycine max
  unsure (1)..(174): unsure at all Xaa locations
  Clone ID: TF_uC-gmflLIB3275P064b07b1.pep
MGVPEKDPLSQLSLPPGFRFYPTDEELLVQYLCRKVAGHHFSLPIIAEIDLYKFDPWVLPNLIDXFAGKAIFGEKEWYFFSPRDRKYPNGSRPNRVAGSGYWKATGTDKIITTEGRKVGIKKALVFYVGKAPKGTKTNWIMHEYRLLDSSRKNTGTKLDDWVLCRIYKKNSSAQ

SEQ ID NO: 32199 - protein, 108 aa, Glycine max
  Clone ID: TF_LIB3242-526-P1-J1-E10.pep
LLLCYCTGLATYGEKEWYFFSPRDRKYPNGSRPNRAAGTGYWKATGADKPIGQPKPVGIKKALVFYAGKAPKGDKSNWIMHEYRLADVDRSVRKKNTLRLDDWVLCRI

SEQ ID NO: 32200 - protein, 294 aa, Glycine max
  Clone ID: TF_GmC250956_1.pep
VLAQIKKKRVMLAMEELLCELSDHEKRNEQGLPPGFRFHPTDEELITFYLASKVFNDTFSNLKFAEVDLNRCEPWELPDVAKMGEREWYLFSLRDRKYPTGLRTNRATGAGYWKATGKDKEVYSASSGTLLGMKKTLVFYKGRAPRGEKTKWVMPEYRLDAHFSLPHTYPSKEEWVICRIFHKSGEKRTPVLQVQGHSDAFFVPNKKFFTSITCKLISFSAARLPKPGSDSPTRPKWPLSPSSFPIGNLQRQKPPIGPTLQAPPAKLHPEDQGTNYYSKSDQNGGRYILSSITR

SEQ ID NO: 32201 - protein, 302 aa, Glycine max
  Clone ID: TF_GmC169_1.pep
MSNISMVEAKLPPGFRFHPRDEELVCDYLMKKVQHNDSLLLIDVDLNKCEPWDIPETACVGGKEWYFYTQRDRKYATGLRTNRATASGYWKATGKDRPILRKGTHVGMRKTLVFYQGRAPKGRKTEWVMHEFRIEGPHGPPKISSSKEDWVLCRVFYKNREVSAKPRMGSCYEDTGSSTLPALMDSYISFDQTQTHADEFEQVPCFSIFSQNQTSPIFNHMTTMEPKFPLNHATTTYGGAPNLGYCLDPLSCDRKMLKAVLNQITKMERNPLNQSLKGSPSLGEGSSESYLSEVGMPHVWNY

SEQ ID NO: 32202 - protein, 93 aa, Glycine max
  Clone ID: TF_jC-gmfl02220085a06a1.pep
LANLLIRHILGSPKCNMSLGFRFHPTDEELILHYLIEEVAFIPLSDTIIGEDDIYNVDPWDLPPKATFGEKERYLFRPRDRQYPDGARINRAF

SEQ ID NO: 32203 - protein, 279 aa, Glycine max
  Clone ID: TF_GmC14820_1.pep
MENRTSSVLPPGFRFHPTDEELIVYYLCNQATSRPCPASIIPEVDIYKFDPWELPEKTDFGEKEWYFFSPRERKYPNGVRPNRATVSGYWKATGTDKAIYSGSKHVGVKKALVFYKGKPPKGLKTDWIMHEYRLIGSRRQANRQVGSMRLDDWVLCRIYKKKNIGKSMEAKEEYPIAQINLTPANNDSEQEMVKFPRTSSLTHLLEMDYLGPISHILSDATYNSTFDFQINTANGGIDPFVKPQPVEIPYAADSGKYQVKQNSTINPTIFVNQVYYQRG

SEQ ID NO: 32204 - protein, 213 aa, Glycine max
  unsure (1)..(213): unsure at all Xaa locations
  Clone ID: TF_GmC195_3.pep
FLIFIYLLLCYFTGLATYGEKEWYFFSPRDRKYPNGSRPNRAAGTGYWKATGADKPIGQPKPVGIKKALVFYAGKAPKGDKSNWIMHEYRLADVDRSVRKKNTLRLDDWVLCRIYNKKGTIEKLQPSSDLRPVGFNPEAAHGLXSCSEQVVSPEFASEVQSEPKWNEWEKSLEFPFNYVDATLNNSFMAQFQGNNQMLSPLQDMFMYWPNKSF

SEQ ID NO: 32205 - protein, 270 aa, Glycine max
  Clone ID: TF_GmC1826_1.pep
RTNRATQAGYWKATGKDRPVHSQKKQVGMKKTLVYYRGRAPHGIRTNWVMHEYRLIESVPGTALSSLKDSYSLCRIFKKTIQIPAKPNNNEEEQPEIANKKESMWISEEQMLGEDSSGTEISREMENVDEKILNHEHPKFPCDASSSDLTQGACTPTDTGIAEDFQPQFACDEANSAANSYTMGIGYSTNIFQDVEMPSYADMHYQLPYTPLVMEDFPQINLPETKTTKPEVTDDCMLYDRYRDCMNGTLEEIISLCCTQDNSVPFPMLE

SEQ ID NO: 32206 - protein, 398 aa, Glycine max
  Clone ID: TF_GmC434_2.pep
MDDIVGYGFRPTDEELVKFYLKHKLLDDDPCVHFILDVDLCEVEPWDLPLLLADSAVRFNDPEWFFFSPVDYKYSNSKRFNRTTKCGFWKPTGKDRGIRTGDTDNTVIGTKKTLVYYQGRVSCGVKSNWVIHEYHAVTFHENQRTFVLCCLMKKPGKTTEGGTDPLICDEGEPSRSMVSDYENQPTAEGIASEGTFTGIEAIFQATPWAENCFSPIQQSPTLIEQEGASFPNYAFNNAYFRNEDNIMQTPFETTKEDEFLNLILADESIVINEENKHDFVNSSTQSESLKRVYCESSDTDAEVISKLDDNIVDISTACNDYPNSDEYYSSKRFKSSHDAVHGGICFLPSNLEANQEKNESMFQDSFWGAETSSCDSTLDKPLEINYIDISSSPFTPWR

SEQ ID NO: 32207 - protein, 152 aa, Glycine max
  unsure (1)..(152): unsure at all Xaa locations
  Clone ID: TF_GmC627_1.pep
EVQVVHNFVGINTLMYYSLTIVQFAGIASNSTGLALSLITSGLNALGTILSMVFIDRYGRRRLILVSMVGIIVFLVVXVLYFYLAVQNAPWNSNHDTLAFGRNSTCEAYPTALILSSWNFMQCLQEDCAFYANSDNQVYNKLTSSNLLLSFP

SEQ ID NO: 32208 - protein, 181 aa, Glycine max
  Clone ID: TF_GmC217080_1.pep
MMEERNNNDAAEKLDEVMLPGFRFHPTDEELVGFYLKRKIQQRPLTIELIKQLDIYKFDPWDLPKLATTGEKEWYFYCPRDRKYRNSARPNRVTGAGFWKATGTDRPIYSSEGSKCIGLKKSLVFYKGRAAKGVKTDWMMHEFRLPSLTDSLSPKYIDQITIPANESWAICRIFKKPMLQL

SEQ ID NO: 32209 - protein, 349 aa, Glycine max
  Clone ID: TF_GmC415_1.pep
MEGDQHGSNYSFPPGFRFHPSDEELIVHYLENKVSSRPLPACIIAEIDLYKYNPWELPNKSLFGEEEWYFFSPRDRKYPNGLRPNRAAASGYWKATGTDKPILSSCGSRRIGVKKALVFYSGRPPKGAKTDWIMNEYRLVDTTIKSSRLKGSMRLDDWVLCRVRYKGYSQKNSCENQESPSELNLSAKLLRSEENPTKMNCRADMIPDYQYKDYQIIASILVGGPIPPIESMPNLSFKGCKGNNVVSDYEDGFTKGNSQTTIPSLESYFNPLTRKSNEDEQYGNLISFNRKFNTDNRMDGSTSKVLNSRELNCYNQNHSQDDIFNGNPPDPTINFQELNELDFSGRYHQ

SEQ ID NO: 32210 - protein, 359 aa, Glycine max
  Clone ID: TF_GmC1307_1.pep
MGSSTNGGVPPGFRFHPTDEELLHYYLKKKVSFQKFDMDVIREVDLNKMEPWDLQERCRIGSTPQNEWYFFSHKDRKYPTGSRTNRATNAGFWKATGRDKCIRNSFKKIGMRKTLVFYKGRAPHGQKTDWIMHEYRLEDGNDPQGSANEDGWVVCRVFKKKNLFKIENEGGSTHKPDHQINNSSNTNARSYRENHYLLHQQQNPRNSSGLELDKPELALHYPPPHLQNPPYSLFQSQPLLQTQKPMVYDYSYTSDTPIMAKQLMTNPRDCESGSDGLRYQVSESGMEVGSCEPNQEMGTGRGEGINEWGVLDRLVTSHLAGNEDSSKGVRFEEANPQSVHQINQLSLRGEMDFWAYGKQ

SEQ ID NO: 32211 - protein, 223 aa, Glycine max
  Clone ID: TF_GmC424_4.pep
MGVPEKDPLSQLSLPPGFRFYPTDEELLVQYLCRKVAGHHFSLPIIAEIDLYKFDPWVLPSKAIFGEKEWYFFSPRDRKYPNGSRPNRVAGSGYWKATGTDKIITTEGRKVGIKKALVFYVGKAPKGTKTNWIMHEYRLLDSSRKNTGTKLDDWVLCRIYKKNSSAQKTAHNGVVPSNEHTQYSNGSSSSSSSQLGDVLESLPSIDERCFAMPRVNTLQHSTT

SEQ ID NO: 32212 - protein, 364 aa, Glycine max
  Clone ID: TF_GmC363_1.pep
MDTFSHVPPGFRFHPTDEELVGYYLRKKVASKRIDLDVIKDVDLYKIEPWDLQELCKIGTDEQSDWYFFSHKDKKYPTGTRTNRATKAGFWKATGRDKAIYSKHCLIGMRKTLVFYKGRAPNGQKSDWIMHEYRLETNENGTSQEEGWVVCRVFKKRMTTTQKVGEYDQSPCWYDEQVSFMQDLESPRRNISQTYASYHHHQQQHHHHPCKPELMELQYNNIPHDAFLQLPQLESPKVTQSSCSVVPYGYESNNNNNGSTLQFSSLTQEEQLQYCNNQQSHHSLYGSNDHAVDQVTDWRVLDKFVASQLSHNNQDVSKETSYSNAPIFHVAEQISVAANGSKKEQVSQEYASTSTSSYQIDLWK

SEQ ID NO: 32213 - protein, 220 aa, Glycine max
  Clone ID: TF_GmC111_1.pep
KIYETLINIPGRITGVRKDGQIRHFFHRPSKAYTTGTRKRRKVHTDKEGSETRWHKTGKTRPVFVGGAVKGFKKILVLYTNYGRQQKPEKTNWVMHQYHLGTSEEEKDGELVVSKIFYQTQPRQCGNNSIIKQDLYDEERLMSNQISVHNDDDNNIIPRSNNASALMDYYNPSFINYDQLGGRSNRESSAQLIPNLAMQGDSSSFIRLAMDATKAMLDRK

SEQ ID NO: 32214 - protein, 161 aa, Glycine max
  Clone ID: TF_GmC806574_1.pep
MGDNNVNLPPGFRFYPTDEELVVHFLHRKASLLPCHPDVIPDLEVYPYDPWELDGRALAEGNQWYYYSRRTQNRVTGNGYWKPTGIEEPVVSSTSNKRVGMKKYFVFHVGEAPAAGIKTNWIMQEYRLSDSSSSTRSSKRKSQPKIVSIHIFIHNQEAHQT

SEQ ID NO: 32215 - protein, 223 aa, Glycine max
  Clone ID: TF_GmC56379_1.pep
MEEDYPPGFRFFPTEEELVGFYLHNKLEGQRNAIAIAIDRVIPVIDINGVEPWNLPTLAGELCRGDTEQWFFFSPGQERETRGGRPSRTTACGYWKATGSPCYVYSSHNKVIGVKKSMVFYKGKAPMGTKTKWKMNEYRAIHVPSQSTPATLHLTCEFSLCRVYVISGSFRAFDRRPLEKEGAESRVHRIENILGGARAHQTCPHSQMLEAGESSSTKWDVNN

SEQ ID NO: 32216 - protein, 233 aa, Glycine max
  Clone ID: TF_GmC130308_1.pep
MAIAAANSSPTMSLSHSQSQEDATTASTTNKPVDVDDNDDHEHDMVMPGFRFHPTEEELVEFYLRRKVEGKRFNVELITFLDLYRYDPWELPALAAIGEKEWYFYVPRDRKYRNGDRPNRVTTSGYWKATGADRMIRTENFRSIGLKKTLVFYSGKAPKGIRTSWIMNEYRLPQHETERYQKAEISLCRVYKRAGVEDHPSLPRCLPTRPSSSRASHDNNKKHNEMVQHNINM

SEQ ID NO: 32217 - protein, 340 aa, Glycine max
  Clone ID: TF_GmC1131_1.pep
MEGTRAKEGTLPPGFRFHPTDEELVTCYLVNKISDSNFTGRAITDVDLNKCEPWELPGKAKMGEKEWYFFSLRDRKYPTGVRTNRATNTGYWKTTGKDKEIFNSETSELIGMKKTLVFYKGRAPRGEKSNWVMHEYRIHSKSSYRTNRQDEWVVCRVFKKSGGAKKYHSSNHARTVNPYSLEIGPSIMPPPMMQLGDPSAHFLYGRNYMNSAELAELARVLRGGGSTSSVNLPIQSQLSYPTSSSAGGGGFIISGLNLNLGGGATATTQPILRPMQPSPPVHTMAQVLDVNSSMMTTSSLGAENNVGYGTEVSNNMNSHGNRYMGMDHHCMDLDNYWPSY

SEQ ID NO: 32218 - protein, 36 aa, Glycine max
  unsure (1)..(36): unsure at all Xaa locations
  Clone ID: TF_LIB3242-679-P1-J1-C10-F1A.pep
IFVKNGELILPPVFRFHPTDEELFLXYLKRKVSYCP

SEQ ID NO: 32219 - protein, 363 aa, Glycine max
  Clone ID: TF_GmC1474_1.pep
MGTPQSNNLPPGFRFHPTDEELILHYLRKKVASIPLPVAIIAEVDIYKFDPWELPAKAAFGEKEWYFFSPRDRKYPNGARPNRAAASGYWKATGTDKNIVASLAGGVREHFGVKKALVFYKGKPPKGVKTNWIMHEYRLVDTNRPIRIKDTSMRLDDWVLCRIYKKFKHAVSPTTEAASTLQVINEQLDQAVVEEEEQIKDTLLPILKNNNTFVPPPQATILMSQKSLSFSNLLDATDYSMLSTILSENHSNNYPTPSETSLFNNCENLDQEITPQNYYINDTNSINNNSYLFQKNPSNMENIARPKRHLPNMDHEDNMLLYPLKKYHSSSCNFPNTNLQNQNPQWNFMFKQPLMSPQYLQFQ

SEQ ID NO: 32220 - protein, 54 aa, Glycine max
  Clone ID: TF_LIB3051-059-Q1-K2-D5.pep
IESMARMGPGFRFHPTDEELVVFYLKRKMTGNLSRYDHIAVVDVYKLEPWDLPR

SEQ ID NO: 32221 - protein, 254 aa, Glycine max
  Clone ID: TF_GmC6673_1.pep
MENMPPGYRFYPTEEELISFYLHNKLEGEREDMNRVIPVVDIYDYNPSELPQISGEASMRDTEQWFFFIPRQESEARGGRPKRLTTTGYWKATGSPNHVYSSDNRIIGIKRTMVFYSGRAPNGTKTDWKMNEYTAIKTSSSSPTLRKEFNLCRVYKKSKCLTAFDRRPPPRRDTESYSGAQNVEEQQKGSTSYDDYHHKMVERSATCSPAESSSSGDHDQPPLHGEEATQMDVDNNDDPFLDWEKVDMFLGSEP

SEQ ID NO: 32222 - protein, 125 aa, Glycine max
  Clone ID: TF_7685641.pep
LVDFYLKRKIQQKSLPIELIKQVDIYKYDPWDLPKLAGTGEKEWYFYCPRDRKYRNSARPNRVTRAGFWKATGTDRPIYSSEGKCIGLKKSLVFYRGRAAKGMKTDWMMHEFRLPCISDSCPAKK

SEQ ID NO: 32223 - protein, 50 aa, Glycine max
  unsure (1)..(50): unsure at all Xaa locations
  Clone ID: TF_uC-gmrominsoy158g10b1.pep
LYLPPGFRFHPTDEEPLXSTYLRCKCASEHICXAITVEIDLFMYHPWDLP

SEQ ID NO: 32224 - protein, 95 aa, Glycine max
  unsure (1)..(95): unsure at all Xaa locations
  Clone ID: TF_jC-gmle01810075f03a1.pep
EFVSRRDPLAHLSFPPGFRFYPTGDDLLVQYLCRNVFGPHFSLSIIAEIDFYKFVPSPLPFKAAFGGKECYFXRPRFRIYPFVLRPNSQRDFCFL

SEQ ID NO: 32225 - protein, 41 aa, Glycine max
  Clone ID: TF_11412668.pep
FHPTDHNLVLHYLCRLCASQSIDVPLITEIYLYIYYTWNLP

SEQ ID NO: 32226 - protein, 35 aa, Glycine max
  Clone ID: TF_LIB3093-046-Q1-K1-A1.pep
SYLSPDFRFHPTDYELILHYLSKKVSSIPLLYSII

SEQ ID NO: 32227 - protein, 61 aa, Glycine max
  Clone ID: TF_uC-gmflminsoy078f11b1.pep
MGTPQSNNLPPGFRFHPTDEELILHYLRKKVASIPLPVSIIAEVDIYKFDPWELPGLSTFK

SEQ ID NO: 32228 - protein, 103 aa, Glycine max
  Clone ID: TF_jC-gmro02910073d08a1.pep
MGEASGAGSADCFSQMMSSMPGFRFHPTDEELVMYYLKRKICGKRLKLDVIHETDVYKWDPEDLPVQSILKTGDRQWFFFCHRDRKYPNGGRSNRATRRGYWK

SEQ ID NO: 32229 - protein, 279 aa, Glycine max
  unsure (1)..(279): unsure at all Xaa locations
  Clone ID: TF_GmC165789_1.pep
MPENMSISVNGQSQVPPGFRFHPTEEELLQYYLRKKVSYEKIDLDVIRDVDLNKLEPWDIQEKCKIGTTPQNDWYFFSHKDKKYPTGTRTNRATAAGFWKATGRDKVIYSNGKRIGMRKTLVFYKGRAPHGQKSDWIMHEYRLDDNNTADTNIVSNVMGDAAQEEGWVVCRIFKKKNHLKTLDSPLASGEGRRSHLFDSCDEGALEQILQQMGRGCKEESSYEGNYNSYGRFAMGLNNGGGGGYNDRFMKLPSLESPKSASMENHHNTNNXCNNNMKSN

SEQ ID NO: 32230 - protein, 438 aa, Glycine max
  unsure (1)..(438): unsure at all Xaa locations
  Clone ID: TF_GmC206_3.pep
ARGNSRSVGVXKTLVFYAGRAPSGERTDWVMHEYTLDEEELKRCLGVKDYYALYKVYKKSGPGPKNGEQYGAPFNEEQWADDDIVDFNINSADQEAPNDVDNGNVLQPLLDDEIDNIIRGILDDELVLDQQHVNGYPDFPQVVSEETQSTVVDQFSEAVMFPEPVRITQPSNQFFDAQPSFDFNRPVTSHLHVSETSEVTSASNIKTKELDFNEDGFLEINDLIDTEPTLSNVENSVEYQHFEDGLSELDLFQDAQMFLRDLGPIIHETDSHAYTNALVSSNIECQSYQLLPNPEDANQTVGEFWMHGESNQLSSPGVVYESVGFPTEGNNNQSSTVEDVATSSLSSALWAFVESIPTTPASAAESALVNRALNRMSSFSRLKIKHTNIAASGKDTGTMKRAGRKGLPFLFFSILIALCAFCWVFVGNLRLVGRSISP

SEQ ID NO: 32231 - protein, 113 aa, Glycine max
  Clone ID: TF_GmC625_11.pep
MPGELQLPPGFRFHPTDDELVNHYLCRKCAAQTIAVPIIKEIDLYKFDPWQLPEMALYGEKEWYFFSPRDRKYPNGSRPNRAAGSGYWKATGADKPIGKPKALLEAGSQDSRL

SEQ ID NO: 32232 - protein, 363 aa, Glycine max
  Clone ID: TF_GmC1311_1.pep
MYSMDSSSSGSQFSQHPQLPPGFRFHPTDEELVVQYLKKKADSVPLPVSIIAEVDLYKFDPWELPSKATFGDQEWYFFSPRDRKYPNGTRPNRAATSGYWKATGTDKPILASHGHHNKVGVKKSLVFYGGKPPKGVKTNWIMHEYRLADSSSNSSSKPPSSASDHAHSGKKNSLRLDDWVLCRIYKKSNSTHLPRLPLMEQNKEISREISMLPMMSTLSMANDNNTPQDSKTASSRSTSYGPLGVENDDNFFDGIFGVDHQSMQQDVSDHSQQVSSKGNFPMKRELSSQFWNGTGSSSSSRRFHYDLNYAGNSTTVEEDNSFVSLLSHLPQNTTTFHPNALLGPVGNGVLRQQFQLPSMNWNT

SEQ ID NO: 32233 - protein, 103 aa, Glycine max
  unsure (1)..(103): unsure at all Xaa locations
  Clone ID: TF_LIB4127-116-Q6-J1-E9.pep
MPPPRTPPTSPPTSMYNDDHEHDMVMPCFRLHPIEEELEXLPLTLRVQGXRLNDELIIFLNLYRYDPWEHSALAAXISEKEWHLYVPIDRKYLNCDRPIRVTT

SEQ ID NO: 32234 - protein, 154 aa, Glycine max
  Clone ID: TF_GmC434_1.pep
MDDDIVGLGFRPTEQELVNFYLKHKLLGDDPRVHVIPVIDLCDVEPWNVPASSSAIRFGDPDWFFFSPVDFKYLKSKRFNRTTKCGFWKATGKDRDIRTRDTDNTVIGTKKTLVYYQGRVSCGVKSNWVIHEYHAVTFHENQVRFFYSINFNTA

SEQ ID NO: 32235 - protein, 313 aa, Glycine max
  unsure (1)..(313): unsure at all Xaa locations
  Clone ID: TF_GmC1127_1.pep
MQDGSASHFFHRAINDYNTGTRKRRKILGQDFGDVRWHKTGRTKPVVFNGIQKGCKKIMVLYVSNVRGGRAEKTNWVMHQYHLGTNEDVXEGEYIISIIFYKXAVXVKLGDKYDEDVPEASEINVLTIVKVDPVTPKFVTPETPCNERWCADLDLGQETHNSPQLPQMDCLDEIQADYQDLANESSMVETQHNEGMDDKEKNTEEGQKWWDSESQNLLDSQQLVEALSLCDDLLQSQSPSRDGKHEDHKNQPGLSVYAQLGPENLKKDIEECQNLALDKANIENDTPSEFRLSQLEFGSQDSFISWGYGKAVN

SEQ ID NO: 32236 - protein, 69 aa, Glycine max
  Clone ID: TF_6454111.pep
DKRGGFPRPVGINKALVFYAGKAPNGEKSNWIMHECGLADVDLFRRKKNSYRLYYWVLYRFYILKCAID

SEQ ID NO: 32237 - protein, 169 aa, Glycine max
  Clone ID: TF_GmC94853_1.pep
YDPWDLPGNCDLQERHFFSPKEAKYRNGNRMNRTTKCGYWKATGSDKRISSSTCNNGIVGVRKTLIFYEGKSPKGSRTHWVLHEYRLVSVETGAANSSHNNYVNEIGDWVLCRLSMKKRSLESDGSATHQKHRQNNTVQTSRPRLMFDFMMVGKTNSSTSSSCSSSSNI

SEQ ID NO: 32238 - protein, 323 aa, Glycine max
  unsure (1)..(323): unsure at all Xaa locations
  Clone ID: TF_GmC398_1.pep
MAKAVGVRFHPTGVELVVYFLKRKVMAKKICDGFIAELDIYKYAPWGLPDKSCLRTGELEWDIFXHLERNMNYGFSXFCALKFGNSSSASDCVYVFLFFNXVSRIKTLIFHTGKSPRGERTDWVMHEHRLEDKDLADKGIAQDSYVVCKVFQKEGLGPGKGTHYARPFNEEEWDDEEIGIPCAALTAQVPTLPITSDGSVANDNHLPASGCIGSASTSCLSGSVPSLGTVNPTGPNDQAVNDDILPMLHIFNDDKWFEEIYNPGQENIVEGAPPSDDFFAGLEDYFAGFSSGQNTGDVGNSDDLDFLELNDLDTPLFYPTTQP

SEQ ID NO: 32239 - protein, 320 aa, Glycine max
  unsure (1)..(320): unsure at all Xaa locations
  Clone ID: TF_GmC424_1.pep
MGVPEKDPLSQLSLPPGFRFYPTDEELLVQYLCRKVAGHHFSLPIIAEIDLYKFDPWVLPSKAIFGEKEWYFFSPRDRKYPNGSRPNRVAXGSGYWKATGTDKIINQLRIMHXIETSPPSRKNTGTKLDDWVLCRIYKKNSSAQKTAQNGVVPSNEHTQYSNGSSSSSSSQLEDVLESLPSIDERCFAMPRVNTLQQQQHHEEKVNVQNLGAGGLMDWTNPSVLNSVADFVSGNNQVVQDQTQGMVNYNCNDLYVPTLCHLGTSVPLKMEEEVQSGVRNQRVGNNNSWFLQNDFTQGFQNSVDTSGFKYPVQPVGFGFRN

SEQ ID NO: 32240 - protein, 99 aa, Glycine max
  Clone ID: TF_LIB3242-682-P1-J1-F9.pep
PHECIFHSTDGELVLRFLCCKCASQHIVDTIIVVLDLYRYDHWDLPGLGLYGEKEWHFFTRRDRTYLNGLRANRSRGTGYWKATGADKPVGNRDRADQE

SEQ ID NO: 32241 - protein, 289 aa, Glycine max
  Clone ID: TF_GmC432_1.pep
KQWKLVQTSGKSLFLLFSLSFSRTKLNLVYKILSLLKLMDRGLDDQKDMREKHVREREKERQGERQALCRGRAPERGRARLLERQRGSLRNREPTRDCSYDNNRIYRRSRERGRDRDRRHEEYLPRCRSISRNSSRIGSSTRQKGGNQEHNRQDAEPDQEVWTKVIRRREAKAAKKNYTQNRSLHNLSANHPNWRDKEDITSFYFTNFTDNVNEVRLWGKFKIWGDVREVFIAKRRNKEGRRFGFVRFKDVSDVKLLETHLDNIFIDDHKLFVNLPRFTRLASNVHTHT

SEQ ID NO: 32242 - protein, 229 aa, Glycine max
  Clone ID: TF_GmC525_4.pep
MEKVSFVKNGELRLPPGFRFHPTDEELVLQYLKRKVFSCPLPASIIPEVDVCKSDPWDLPGDLEQERYFFSTKEAKYPNGNRSNRATNSGYWKATGLDKQIVTSKGNQVVGMKKTLVFYRGKPPHGSRTDWIMHEYRLNILNASQSHVPMENWVLCRIFLKKRSGAKNGEESNKVRNSKVVFYDFLAQNKTDSSSSAASGITHEHESDEHDHEESSSSNTFPYTIRTKP

SEQ ID NO: 32243 - protein, 362 aa, Glycine max
  Clone ID: TF_GmC83_1.pep
LLIRQIMGNPESNLPPGFRFHPTDEELILHYLNKKGKKVASIPLPVSIIAEVDIYKLDPWDLPAKATFGEKEWYFFSPRDRKYPNGARPNRAAASGYWKATGTDKTIVTSLQGGAQESVGVKNALVLYKGRRPKGVKTNWIMHEYRLVDNNKPIKLKDSSMRLDDWVLCRIYKKSKHALTSTEASIGVGEVDQAEEHLFQETLLPISKSPAPPPQNTLISQKSVSFSNLLDAMDYSILSSFLSENHTNHPPWVGSSAGFNTGNLDQQCSPINNNNPTNNYMFQKNPQLNPSVSNMENMMRPKRQVSNMDEETLYPSKKYLSSSCNFPTNISNQYENPQWNYLMKQSLMNQRLMLGPHLQFQG

SEQ ID NO: 32244 - protein, 120 aa, Glycine max
  Clone ID: TF_LIB3056-003-Q1-N1-G7.pep
MERLNFIKNGVSRLPPGFRFQPTDEELVFQYLKCKIFSCQLPASIIPEINVSKNDPWDLPGNCDEQERYFFSSKEAKYRNGNRMNRTTNSGYWKATGSDKKISSSISNIGFAGLRKTLIF

SEQ ID NO: 32245 - protein, 321 aa, Glycine max
  unsure (1)..(321): unsure at all Xaa locations
  Clone ID: TF_GmC207_2.pep
MTWCNDSDEDRVIESMTPTITITPNTDGIKLTEEIRTITCPSCGHNIDFVKYXGGIHDLPGLPAGVKFDPNDQEILEHLEAKVASDACKLHPLIDEFIPTLEGENGICYTHPEKLPGVSKDGQIRHFFHRPSKAYTTGTRKRRKVHTDDEGSETRWHKTGKTRAVFAAGGAVKGFKKILVLYTNYGRQKKPEKTYWVMHQYHLGNTEEEKDGELVVSKVFYQTQPRQCVNPIIIKDPYEKMLNGGSVQDSTNTSITKTTATLLDCYNAPYIDYDHAHASHNRESSSQLIIPSSVVQVDGSYIRSTMDAKKARFESNTGKSF

SEQ ID NO: 32246 - protein, 278 aa, Glycine max
  unsure (1)..(278): unsure at all Xaa locations
  Clone ID: TF_GmC423_1.pep
MATTTQLHLPPGFRFHPTDEELVIHYLCRKCASQHIAVPIIAEIDLYKYDPWDLPGMALYGEKEWYFFTPRDRKYPNGSRPNRSAGTGYWKATGADKPVGKPKPVGIKKALVFYAGKAPKGEKTNWIMHEYRLADVDRSVRKKNSLRLDDWVLCRIYNKKGAIEKQQLPPPSGVRKIECYEMEDEKPEILPPDXTAATVADCLYFEASDSVPRLHTTDSSCSEQVVSAEFASEVQSEPKRGSNNNNEFAYNYVDATLGNNQMSPLQDIFMYLSKSFCN

SEQ ID NO: 32247 - protein, 416 aa, Glycine max
  Clone ID: TF_GmC74085_1.pep
SINYLMMEEPVVVNKGDYDHDHDQPLDLPPGFRFHPTDEEIITCYLTEKVLNRAFSATAIGEADFNKCEPWDLPKKAKMGEKDWYFFSTWDRMIPTGMRTNRATQSGYSQTLSTSLWSVPRKNNLVGMKKTLVFYRGRAPKGEKTNWVMHEFRLDGKFACYNLPKAAKDEWVVCKVFHKSSTTTTDVNKRVLPIINPGLLRMNSSNGEDLLFDFSSLPPLVDPLFDQTSNKHIDNDFKGTNNTPSSSSAKLPSSSGYYLPNFNNNNNNQQMLMMKPEEHKIYEIPINNYASTSQVDFTTTNNPMGISTSNNNILLSQPQIRTQNSTSVPFNMFQDCYNHTHQGKQCKMEQFSIDSTKKQPVVSASQDTCLSNDTSSVVSKQDNNMGRNKALYEDNFEGPSSVATTLSDLECLWDDY

SEQ ID NO: 32248 - protein, 123 aa, Glycine max
  Clone ID: TF_GmC44609_2.pep
MAKPKMPGYRFQPTDVELIEYFLKRKVRGKKFPSEIIAEVDLYKFAPWDLPAMSLLKNGDLSWYFFCPRGKKYSTGGRLNRATEAGYWKTTGKDRAIEHNNRVVGMIKTLVFHTGRAPKGDRT

SEQ ID NO: 32249 - protein, 244 aa, Glycine max
  Clone ID: TF_GmC206_4.pep
MGEASGAGSADCFSQMMSSMPGFRFHPTDEELVMYYLKRKICGKRLKLDVIRETDVYKWDPEDLPGQSILKTGDRQWFFFCHRDRKYPNGGRSNRATRRGYWKATGKDRNVICNSRSVGVKKTLVFYAGRAPSGERTDWVMHEYTLDEEELKRCQGVKDYYALYKVYKKSGPGPKNGEQYGAPFNEEEWADDDIVDFNINSADQEAPNDVADNVNVPLPFLDDEIRMSIREILDDELHIHCCNR

SEQ ID NO: 32250 - protein, 144 aa, Glycine max
  unsure (1)..(144): unsure at all Xaa locations
  Clone ID: TF_GmC499_2.pep
MESTDSSSGSQQPNLPPGFRFHPTDEELVVHYLKKKAASAPLPVAIIAEVDLYKFDPWELPAKAAFGEQEWYFFTPRDRKYPNGARPNRAATSGYWKATGTDKPVLTSGGTHKVGVXKALVFYGGKPPRGIKTNWIMHEYRLTD

SEQ ID NO: 32251 - protein, 58 aa, Glycine max
  Clone ID: TF_701070486H1.pep
QRGKFPGLELLDVNDGDLFVPGEFSSNFPLKLEHHQSFVGGLNRNPGPMRAIDSIQER

SEQ ID NO: 32252 - protein, 224 aa, Glycine max
  Clone ID: TF_GmC525_2.pep
MEKVNFVKNGELRLPPGFRFHPTDEELVLQYLKRKVFSCPLPASIIPELHVCKSDPWDLPGDLEQERYFFSTKVAKYPNGNRSNRATNSGYWKATGLDKQIVTSKGNNQVVGMKKTLVFYRGKPPNGSRTDWIMHEYRLILNASQSQSHVVPMENWVLCRIFLKRRIGAKNGEESNSKVVFYDFLAQNKTDSSSSVASGITHESDEHEESSSSNTFPYTIRRKP

SEQ ID NO: 32253 - protein, 326 aa, Glycine max
  Clone ID: TF_GmC5702_1.pep
MMPGNGQLTVPPGFRFHPTDEELLYYYLRKKVSYEVIDLDVIREVDLNKLEPGDLKDKCRIGSGPQNEWYFFSHKDKKYPTGTRTNRATTAGFWKATGRDKSIYHTNSKRIGMRKTLVFYTGRAPHGQKTDWIMHEYRLDEDDADVQEDGWVVCRVFKKKNQSRGFQQELEEEEHLTTHMRASGPCQVLEQKHLHMQGGPYDHYNFDGTMHLPQLFSPESAIAPPTNSSLALSMNAMDILECSQNLLRLTTTGCGLNLMQQQQEERFSGDWSFLDKLLASHHGMDQSKCNPPTNHHAATAVGTSAQKFPFHYLGCDTTHDIMKFSK

SEQ ID NO: 32254 - protein, 104 aa, Glycine max
  Clone ID: TF_LIB3242-060-Q1-J1-E1.pep
MVQKEKEAIIKEGTTEIEMEGTRAKEGTLPPGFRFHPTDEELVTCYLVNKISDSNFTGRAITDVDLNKCEPWELPGKAKMGEKEWYFFSLRDRKYPTGVRTNRA

SEQ ID NO: 32255 - protein, 313 aa, Glycine max
  Clone ID: TF_GmC5682_1.pep
MGVNEDFNKDIDDHHHEYVDDDDVPLPGFRFHPTDEELVSFYLRRKLHKKPISIELIKQIDIYKYDPWDLPKTSATAEEKEGYFFCRRGRKYRNSIRPNRVTGSGFWKATGIDKPVYSHGGEGNDCIGLKKTLVYYRGSAGKGIKTDWMMHEFRLPSNKDNTTNLPSSKNYVDVPQEAEIWTLCRIFKRNVSQRKHTPDLKQLSAKRHSIHDKNSRMSNVEFNNTNQESYINFGGHYQNEQKPVINYTNSDQRNQYHVMTHQLFAAPVAQHHQQPQQLTSPSSNFWLNSPPGNDFFTFDNWDELGSVVKFVVD

SEQ ID NO: 32256 - protein, 358 aa, Glycine max
  Clone ID: TF_GmC648_2.pep
MTNDNIAVTDLTSALNEENRADLVNALKSKIQSLAGAHSDVLETLSPNVRKRVESLREIQGKHDEIEADFLKEKEALEAKYQKLYQPLYTKRYEIVNGVIEVEGAANETTDESEEDKEKGVPSFWLNAMKNNDVLAEEISERDEGALKFLKDIKWSRIENPKGFKLDFFFDTNPYFSNTILTKTYHMIDEDEPILEKAIGTEIEWYPGKCLTQKVLKKKPKKGSKNAKPITKTESCESFFNFFKPPEVPEDDADIDEDLAEELQNQMEQDYDIGSTLRDKIIPHAVSWFTGEAAQGDEFEDLEDDEDEEEDEDEDEDEEDDEDEDDEEEDDTKTKKKKSGKAQAGDGDGERPPECKQQ

SEQ ID NO: 32257 - protein, 366 aa, Glycine max
  unsure (1)..(366): unsure at all Xaa locations
  Clone ID: TF_GmC532_1.pep
MSDLGSDLPAAAAALSAEDRAGLVNALKDKLQLLAGQHVDILETLPPKVRQRVEILRDLQSQHDEVEAKFLEERSKLEAKYQKLYEPLYTKRYEIVNGVVEVEGVTNVAVPEEANKAAEDKGVPEFWLTAMKTNETLVEEITELEEGSLKYLKDIKRYINDXSLGHHSRFLGXKLDYFKNSELTKTYHMIEDDDPILEKAIGTEIEWHPGKCLTQKILKKKPSKGSKNAKPITKTEKCESFFNFFNPPQVPEDDDDIDDDAVEELENLMEHDYDIGSTIRDKIIPHAVSWFTGEAAQSDFEDIDEDDYEDEEGDDDDDEDEDEDEDEEDEEEKKGKSKSKSKLQSGGRAIPGKDQPMERPPECKQQ

SEQ ID NO: 32258 - protein, 191 aa, Glycine max
  Clone ID: TF_GmC648_6.pep
MSNDKDTFNVADLTSALNEDNRADLVNALKSKIQSLAGQHSDILESLSPNVRKRVEVLREIQGQHDELEAKFFEERAALEAKYQKLYQPLYTKRYEIVNGTTEVEEGAVKETAPDNEEDQEKGVPAFWLTAMKNNEVLAEEISERDEGALKYLKDIKWSRIENPKGFKLDFFFDTNPYFTNSVLTKTYHMI

SEQ ID NO: 32259 - protein, 66 aa, Glycine max
  Clone ID: TF_GmC532_3.pep
CWACTINNFILNMPNYISSSTIICSLVLHLYLVSFREQIIKKKKPFPTRDHQIINTLSFNINEKYY

SEQ ID NO: 32260 - protein, 147 aa, Glycine max
  unsure (1)..(147): unsure at all Xaa locations
  Clone ID: TF_uC-gmroLIB3259P244c01b1.pep
LPGRLGGEPIFEKAIGTGIQWPPRKSLAPKILXKNPKRGWRMVNPLPKLEIGEASFIFFTPPQVLXDDENIHXNVAGGLPNQMGPDYFIWSPIRDKNISPAVSWVTGEATPGDEFWDLEDDEDDEDIEKDDDXDEEDDDHYYDYHYY

SEQ ID NO: 32261 - protein, 145 aa, Glycine max
  Clone ID: TF_LIB4203-002-R1-K1-H7.pep
MSAPTAKASKKELNSNHDGADETSEKEQQEAIEHIDEVQNEIDRLNEQASEEILKVEQKYNKLRQPFFQKRSELIAKIPNFWVTTFVNHPQVSALLGEEDEEALHYLTRVEVTEFGDIKSGYRIDFYFDENPYFENKVLFKEFHL

SEQ ID NO: 32262 - protein, 147 aa, Glycine max
  Clone ID: TF_GmC532_2.pep
NCNYFCAILVPEKDQTRADSARGESFFNFFNPPEVPEDDDDIDEDAVEELQNLMERDYDIGSTIRDKIIPHAVSWFTGEAAQSDFEDIDEVDYDDEEGDEDEDEDEDEEEEEEEEEEKKGKSRSKSGGRVKPGKDQPTERPPECKQQ

SEQ ID NO: 32263 - protein, 135 aa, Glycine max
  unsure (1)..(135): unsure at all Xaa locations
  Clone ID: TF_GmC648_5.pep
NLPKTESCESFFNFFKPPXEVPEDEARVDEDLAEELQNQMEQDYDIGSTIRDKIIPHAVSWFTGEAVEGDEFEDLEDDEDGDDDEDDEEEDEDEDDDDGDEEEEDSKTKKKSSAVKKSGRAQAGDGERPPECKQQ

SEQ ID NO: 32264 - protein, 55 aa, Glycine max
  Clone ID: TF_700899387H1.pep
GIILSRIVDTTCHNSRSIKFWSSSTASSAISSSSSWTSGGVKKLKKLSPRAESAR

SEQ ID NO: 32265 - protein, 262 aa, Glycine max
  Clone ID: TF_GmC648_4.pep
MTNNNDNIAVTDLTSALNEENRADLVNALKSKIQSLAGAHSDVLETLSPNVRKRVESLREIQGKHDEIEADFLKEKEALEAKYQKLYQPLYTKRYEIVNGVIEVEGAANETTDESEEDKEKGVPSFWLNAMKNNDVLAEEISERDEGALKFLKDIKWSRIENPKGFKLEFFFDTNPYFSNTILTKTYHMIDEDEPILEKAIGTEIEWYPGKCLTQKVLKKKPKKGSKNAKPITKTESCESFFNFFKPPEVPEDDVDIDEDLV

SEQ ID NO: 32266 - protein, 258 aa, Glycine max
  Clone ID: TF_GmC602_2.pep
MVGDNTKKLKVAENLEDSIDGELVLSIEKLQEVQDELDKINEEASDKVLEVEQKYNEIRKPVYDKRNDVVKSIPDFWFTAFMSHPALCELLNVEDQKIFKYLGSLDVEDNKDVKSGYSITFNFNPNPYFENTKLTKTFTFLEEGTTKITATPIKWKEGKGLPNGLDHDKNGNKRARIDISFFSWFSDCEQKDDVDEIHDEVAELIKDDLWPNPLTYFNNELDEEDVDSEADDEENDEDDSEDDDQEENDAGSEDGNHS

SEQ ID NO: 32267 - protein, 370 aa, Glycine max
  Clone ID: TF_GmC648_1.pep
MSNDKDTFNVADLTSALNEDNRADLVNALKSKIQSLAGQHSDILESLSPNVRKRVEVLREIQGQHDELEAKFFEERAALEAKYQKLYQPLYTKRYEIVNGATEVEEGAVKETTPDGEEDQEKGVPAFWLTAMKNNEVLAEEISERDEGALKYLKDIKWSRIENPKGFKLEFFFDTNPYFINSVLTKTYHMIDEDEPILEKAIGTEIQWHPGKCLTQKILKKKPKKGSKNAKPITKTENCESFFNFFNPPQVPEDDEDIDEDAAEELQNQMEQDYDIGSTIRDKIIPHAVSWFTGEAIQGDEFGDLEDDEDDEDIEEDDDEEEEEDEDDDDDEDDEEESKTKKKSSAPKKSGRAQLGDGQQGERPPECKQQ

SEQ ID NO: 32268 - protein, 264 aa, Glycine max
  unsure (1)..(264): unsure at all Xaa locations
  Clone ID: TF_GmC602_1.pep
MVADRSKKPKVSEKGENLDEIDGELVLSIEKLQEIQDELEKINEEASDKVLEIEQKYNEIRKPVYDKRNDIIKAIPDFWLTAFLSHPALGDLLNEEDQKIFKYLSSLEVEDFKDVKSGYSITFNFNANPYFEDTKLVKTYTFLEEGTTKVXATPIKWKEGKGIPNGVNHEKKRDKRGXTDVSFFSWFSDTEQKDDIDDIHDEXVAELIKDDLWPNPLTYFNNEEPDEEEGDEDEADDEGKEDESDDDDDNQEEDDDEGEEDDYK

SEQ ID NO: 32269 - protein, 346 aa, Glycine max
  Clone ID: TF_GmC648_3.pep
MFNCEQSKIQSLAGQHSDILESLSPNVRKRVEVLREIQGQHDELEAKFFEERAALEAKYQKLYQPLYTKRYEIVNGTTEVEEGAVKETAPDNEEDQEKGVPAFWLTAMKNNEVLAEEISERDEGALKYLKDIKWSRIENPKGFKLDFFFDTNPYFTNSVLTKTYHMIDEDEPILEKAIGTEIQWHPGKCLTQKILKKKPKKGSKNAKPITKTENCESFFNFFNPPQVPEDDEDIDEDVAEELQNQMEQDYDIGSTIRDKIIPHAVSWFTGEAIQGDEFGDLEDDEDDEDIEEDDDEDEEDDDDDDDDDDDEEESKTKKKSSAPKKSGRAQLGDGQQGERPPECKQQ

SEQ ID NO: 32270 - protein, 143 aa, Glycine max
  unsure (1)..(143): unsure at all Xaa locations
  Clone ID: TF_LIB4127-038-Q1-K1-G3.pep
LPPCRRVLVFKIFSPLTLQGQHDELEAKFFEERAALEAKYQKLYQPLYTKRYEIVNGTTEVEEGAVKETAPDNEEDQEKGVPAFWLTAMKNNEVLAEEISXRDEGALKYLKDIKWSRIENPKGFRLDFFFDTNPYFTKXCLDK

SEQ ID NO: 32271 - protein, 128 aa, Glycine max
  Clone ID: TF_GmC259_3.pep
DPKQQKRIRKRSFVAGFATLSVGFRLQGKSIAAATTSASFASWNRPNFPPKVYHPHGNMATGPADSYTETKCGVCHAGTDEHLLLLCDLCDTASHTYCVGLGYTVSDGDRFCHDCAISRETNINEESD

SEQ ID NO: 32272 - protein, 76 aa, Glycine max
  Clone ID: TF_GmC126_6.pep
MPYNPDDLMVQCEGCKDWDYKMYHPACMGMTIEEAKKLDHFVCSECSSDDDMKKPQATFSASLGADGKVEPKRRKR

SEQ ID NO: 32273 - protein, 701 aa, Glycine max
  unsure (1)..(701): unsure at all Xaa locations
  Clone ID: TF_GmC1741_1.pep
MVVSGGKGLKRAAKKRVTADFYDFLTFPTPSLAEAENFAGGPFRSNVRAFLTKHALLPPPSALFPHLLTWQIVFRVGELTEGPDAPVVCLDVVEEDVARSRSVYCDQCRVFGEMTRPFFLRFIACFDLPCYFCVNKVSPKWSETRLILDQCNAIDPDXYILVYSLFLSSDNTTHLLHGVVHTNGYGHLEPNRLEEGGSRFLSGIHIMDFWDRLCKTLGVRKVSVMDVSKKYGIEYRLLHAIMKGHPWYGDWGYKFGSGSYCLTHESYKSAVESLSNLPLSTFSQGKMPDSRVQDMIKYYQSLSEHELVNIRDLFCFIMGLIGDAHKTASNVDETTCKKRCFNASGLSISWDKSGIERVEQAMIIVLCAVSESKWVSWRALMGAASKLGSSELLDYCLGELGGKMVYGGMVVNSYGCVKTTEGEFRLEAATGACYGILAKNNSLGSKYPSEENLLQCLRYLYDSLLHPQMMVNYEAGTRTLAMNSAQKLFDCKQFVKDYNPEMWPLSDSQMFRLSCHVELVDEFEDSEAITPPELVVLPLNATVAELKNQAANAFQDVYLRFRRLQVDGLHGYSGVDDSTQVKLLLGSRDVVCVRGRCIGKNGLSKFRMERGLERWTVDCSCGAKDDDGERMLACDICGVWRHTRCSDIHDTDPVPARFVCLKCQNCESKLKCSGHCKDETVTNVSGSSCFRNGLPVPSDVI

SEQ ID NO: 32274 - protein, 204 aa, Glycine max
  unsure (1)..(204): unsure at all Xaa locations
  Clone ID: TF_LIB4391-058-R1-K1-B5.pep
NWRTSVLVKGSMLSLEKWMLQVAEFHANAVVSVKPKKPSFKERKQKLLTFLQEKYEPVCAKWTTERCAVCRWVEDWDYNKIIICNRCQIAVHQECYGARNVQDFTSWVCKACETPDIKQECCLCPVKGGALKPTDVDTLWVHVTCAWFRPEVSFASDEKMEPALGILSIPLNSFVKEIHGSCTQCCKCSTYFHAMCASRAXYRM

SEQ ID NO: 32275 - protein, 97 aa, Glycine max
  Clone ID: TF_GmC1741_5.pep
KFRMERGLERWTVDCSCGAKDDDGERMLACDICGVWRHTRCSDIHDTDPVPARFVCQKCQHSESKLKSSGHCKDETVTNVSGSSCFRNGLPVPSDVI

SEQ ID NO: 32276 - protein, 564 aa, Glycine max
  Clone ID: TF_GmC276_1.pep
EKPQPKVKWSKNNGQLVLPNRVTVLCNGVEVIIFPSLHIVVCKCGFCRTEKQALSAWERHTGSKLRNWRTSIRVKDSMLPLEQWMLQLAEFHATAQVPTKPKKPSLKERKHKLLTFLQEKYEPVHAKWTTERCAVCRWVEDWDYNKIIICNRCQIAVHQECYGARNVRDFTSWVCKACERPDIKRECCLCPVKGGALKPTDVDTLWVHVTCAWFRPEVSFASDEKMEPALGILSIPSNSYVKICVICKQIHGSCTQCCKCSTYFHAMCASRAGYRMELHCLEKNGKQTTKMVSYCAYHRAPNPDTVLIMQTPLGVISTKSLLQTKKKTGSRLISSSRKKQDDSPVDNTEHEPFSAARCRIFQRTNHTKKRAADEAVSHRVRGPYHHPLDAIESLNTHRVVHEPQAFSSFRERLYHLQRTENDRVCFGRSGIHGWGLFARRNIQEGDMVLEYRGEQVRRSIADLREARYRLEGKDCYLFKISEEVVVDATDKGNIARLINHSCMPNCYARIMSVGDEESRIVLIAKTNVVAGDELTYDYLFDPDEPEENKVPCLCKAPNCRKFMN

SEQ ID NO: 32277 - protein, 128 aa, Glycine max
  unsure (1)..(128): unsure at all Xaa locations
  Clone ID: TF_uC-gmflminsoy049c10b1.pep
MKGGRSHRPRSSDPPDEWVDGSWTVDCICGVTFDDGEEMVKCDXCGVWVHTRCSRYVKGDDTFSCDKCKARHNKNNTTTNNSNNNSNSTTNPMETEVAQFLVELPTKTISMDNKKALLCRPRLWTDSP

SEQ ID NO: 32278 - protein, 333 aa, Glycine max
  Clone ID: TF_GmC6775_1.pep
MIQNADMRLESGTCNVCSAACSSCMHPNRALMGSKAEEFSDENCRLGEVNQYCDESDRSSLGSRACERLKHGVSETSHKPSVSSTHDSLSENAENSQALSEKYQDSKCLESLDDSTSCISRTSNANLASSCHQINTDRINISCSSTSVSHLVAEGSGNGPTVDISSLSECCMENVDSSLTKERVPIIVPGEKSLADKENLNNGTAKVSIEICPKSEEDTENNVDVAEDDDHKYSAHDGLHEKVEELIKSSGRAEPQSEDESDESDVVEHDVKVCDICGDAGREDLLAICSRCSDGAEHIYCMREMLEKVPEGDWLCEECKCAEETANRKLDIE

SEQ ID NO: 32279 - protein, 36 aa, Glycine max
  unsure (1)..(36): unsure at all Xaa locations
  Clone ID: TF_jC-gmXLIB3563P061bd07a2.pep
GGDLICCDGCPSTIHQSCLXIHMXXPXEWLXLSLKV

SEQ ID NO: 32280 - protein, 49 aa, Glycine max
  Clone ID: TF_5819965.pep
DNDDYGDILCGVCGENYGTDEFWICCDICDKWFYGKCVKIILARVELIK

SEQ ID NO: 32281 - protein, 180 aa, Glycine max
  Clone ID: TF_GmC195872_1.pep
MKGGRSHRPQSSDPPDEWVDGSWTVDCICGVTFDDGEEMVKCDECGVWVHTRCSRYVKGDDTFACDKCKARHNSNSNNTTTTTTNTTNPMETEVAQFLVELPTKTISMDNKKALPSRPRLWTDKPIEERVHVQGPPGGDPSIFAGQSASSIFTPQLWKACGYVPKKVSFKYNEFPFLNMI

SEQ ID NO: 32282 - protein, 140 aa, Glycine max
  Clone ID: TF_GmC1724_4.pep
MDLVPSVKEKLNYFRIKELKDVLTQLHLSKQGKKQDLVDRILSVLSDEQVSKIWAKKNAGGGKEQVAKLVDDTYRKMQISGATDLASKGQGASYSSSVKVKSECDDAFQPDVKIRCLCGSRFKTEKLVKCEDARCHVWQH

SEQ ID NO: 32283 - protein, 302 aa, Glycine max
  unsure (1)..(302): unsure at all Xaa locations
  Clone ID: TF_GmC454_8.pep
MMESEGEAGAKPMKTLGGKICQICGDNIGNNVNGDPFIACDVCAFPVCRACYEYERKDGNQSCPQCKTRYKRHKGSPAILGDQEEDGVADEGASDLNYNSENQNEKQKIERMLGWQMAHGRAEEAVAPNYDKEVSHNHIPLLSGGQEVSGELSAASPERLSMASPGGRGKRVHNLQYSSDLNQSPNIRVGDPGLGNVAWKERVDGWKMKQDKNVAPMSTGQATSERGAGDIDASTDVLVDDSLLNDEARQPLSRKVSIPSSRINPYRMVIALRLVILCIFLHYRITXPVPNAYAXLWLISVI

SEQ ID NO: 32284 - protein, 60 aa, Glycine max
  unsure (1)..(60): unsure at all Xaa locations
  Clone ID: TF_LIB3242-276-Q1-J1-D1.pep
KTQNNKXXIHKIVKHTGLFCHGKKEQSKLSEESYTGKIKAGKVGTNLKYLFSSIEPDERG

SEQ ID NO: 32285 - protein, 123 aa, Glycine max
  Clone ID: TF_GmC454_7.pep
MTESEEAGAKPMNTLGGQVCQICGDNIGNNVNGDPFIACDVCAFPVCRACYEYERKDGNQSCPQCKTRYKRHKGSPAILGDQEEDGVADEGASDLNYNSENQNEKQKIEHSHWLPQGSPEGAD

SEQ ID NO: 32286 - protein, 437 aa, Glycine max
  Clone ID: TF_GmC8684_5.pep
MEPQLQPKLEPAPELVSAGAEDSEKSHVSDVTEVRHVAMAEANAGCCASVLKRKRGRPAKGSRVPKGMTPPSRQKKEEEDVCFICFDGGSLVLCDRRGCPKAYHPWCIKRDEAFFRSKAKWNCGWHICSACGKGSHYMCYTCTYSLCKRCTKNADFVSIRENKGLCGICKRTIMLIENCAQGDKAECEVDFDDKSSWEYLFKVYWMYLKEKLSLTFDEILQAKNPCKGVARLEASGVAVDVSSLLLSPKMELPINNFANDKPWHYQDPTGKVQGPFSLLQLYKWNACGYFPSDLRIWRVDETQNNSIFLTDVLNGKCSKNVSLPNNSQQLSLGTNSTLENKENSQDGGENENNATRNGNSANHQIVEQCDEQKVADTYTQSNGKDESVRSNGWNSQSPGLTIQADGNNNEGQSGNSERMEESPKCEISCHDIPHVYT

SEQ ID NO: 32287 - protein, 184 aa, Glycine max
  Clone ID: TF_GmC77995_1.pep
MDTKGRLVAGSHNRNEFVLINADETARVAVTELSGQICQICGDELEVTVNGEPFVACNECAFPVCRPCYEYERREGNQVCPQCKTRYKRIKGSPRVEGDEEEDDTDDLESEFDIGSVFSARLNYGSQVNGSVIHAPSEFDAASVASEIPLLTYGQEDVGISADKHALILPPFTASRETGVCHAF

SEQ ID NO: 32288 - protein, 531 aa, Glycine max
  Clone ID: TF_GmC1432_1.pep
VVCNGMEGFYIPKLHLVMCKCGSCGSRKQTLSEWEKHTGCRSKKWKHSVKVKSTMLPLEKWMEENIPLDGIPEQVDQQQVLAFLQEKYEPVNVKWTTERCAVCRWVEDWEDNKIIICNRCQIAVHQECYGAKNVQDFTSWVCRVCETPDVERECCLCPVKGGALKPTDVEMLWVHVTCAWFRPQVVFQNHEAMEPAMGILKIPPNSFVKTCVICKQSHGSCISCCKCSTYFHVMCASRAGYTMELHSMEKNGTQVTRKLIYCAIHRVPNPDSVLVVHTPLGIFSPRTSLQNQKGCFRGSRLILSKNIELNESSTTENDLVEPLSAARCRVYRRSPNKRADVPIIHLLGGPSLHSLGAITQLNIFKDADESKVFTSFKERLHHLWETEKFRVCFGKSGIHGWGLFARRDIQEGEMVVEYRGVHVRRSVADLREEKYRSEGKDCYLFKISEEVVVDATNRGNIARLINHSCMPNCYARIMSLGDQGSRIVLIAKTNVSAGEELTYDYLFDPDERDELKVPCLCKAPNCRRFMN

SEQ ID NO: 32289 - protein, 184 aa, Glycine max
  Clone ID: TF_GmC96941_1.pep
MEAVCLHCGDRGFPETLVFCSQCKAYALHRYCLKGPVIFTDAVTWFCEDCATKLWVPPALDQSTPISSVTRKNCVLGVKKHNKQQKKKVKKKQKEGKANSVLVAETKVVLSGSHSSPGPEHPQCSNRGEEYEVKNDCGPAPRDVANFVAGEEESVARDIANSDEGFKSVPVSQGANNSDSGWVE

SEQ ID NO: 32290 - protein, 468 aa, Glycine max
  unsure (1)..(468): unsure at all Xaa locations
  Clone ID: TF_GmC454_10.pep
EFPRRPTRPGAQVCQICGDGVGKTVDGEPFVACDVCAFPVCRPCYEYERKDGNQSCPQCKTRYKRHKGSPAILGDMEEDGAAAADASDFNYDSENQNQNQNQKQKISERMLSWQLTYPRGEEVGAPNYDKDVSHNHIPLLTSGQEVSGXELSAASPERLSMASPAVGGGKRVHNIPYSSDINQSPNIRAGDPGLGNVAWKERVDGWKMKQEKNVVPMSTGQAASERGAGDIDASTDVLVDDSLLNDEARQPLSRKVSIPSSRINPYRMVIMLRLVILCIFLHYRITNPVPNAYPLWLVSVICEIWFAISWILDQFPKWLPVNRETYLDRLALRYDREGEPSQLAAVDIFVSTVDPLKEPPLVTANTVLSILAVDYPVDKVSCYVSDDGAAMLTFEALAETSEFARKWVPFSKKYSIEPRAPEWYFSQKIDYLKDKVHPSFVKDRRAMKREYEEFKVRINGLVSKAQKV

SEQ ID NO: 32291 - protein, 83 aa, Glycine max
  Clone ID: TF_700735931H1.pep
LICCDNCPSTFHLACLSTQEIPDGDWYCTNCTCRICGNLVIDKDTSDAHDSLQCSQCEHKYHEKCLEDRDKQEVAISDTWFCG

SEQ ID NO: 32292 - protein, 90 aa, Glycine max
  Clone ID: TF_GmC340979_1.pep
KLSSQRFPCDNSAPVIFIPVDQNLPDNIFESAQSNACVVCRGREPEDLLESCDVCHIRKIHSYCMDPPLRPWICPHCKELRMHYRSNHLY

SEQ ID NO: 32293 - protein, 97 aa, Glycine max
  Clone ID: TF_LIB4390-044-R1-N1-E9.pep
DLAVPVFYDPGGPLCGACGGPFGPDEFWICCALCQKWFPGKCVKIPPVRAGPFHPFRCPFSRTKRARPCLPWAQFPPFPSLLGPVFLLFFLDVPVNG

SEQ ID NO: 32294 - protein, 438 aa, Glycine max
  Clone ID: TF_GmC47902_1.pep
HGWAHEIAQLPCDSDGVCMLCKLKPSPSQTLSCGTCATPWHLPCLPSPPLSLSDSHWDCPDCSDTFCHHPVAPTAHLVSAIHAIQADTSLTDQQKAIKRQQLLAGSAHPSKDKTKAKDIFDGSLNCSICMQLPDRPVTTPCGHNFCLRCFEKWIGQGKRTCANCRAQIPTKMASQPRINSQLAMAIRLAKAAKSEGSSGPPKVYHCPRNQDRPDTAFTTERAKKTGKANACSGKIFVTVPPDHFGPIPAENDPTRNRGVLVGDTWEDRMECRQWGAHLPHVAGIAGQSAYGSQSVALSGGYEDDEDHGEWFLYTGSGGRDLSGNKRTNKLQSFDQSFIKNRACGGGRTLRAQKNVMKCPSCSNDIADFLQNPQVNREMLAVIESLQRQAEENSEELSDKNDENLHDPTEVSKPSDSTDKVLEEIKDNELNQPHKRRKE

SEQ ID NO: 32295 - protein, 709 aa, Glycine max
  Clone ID: TF_GmC961_1.pep
MRLVRMSLQQLSADSEGACMVCKGLPGQEERLLCVTCDTPWHVPCLFAPPPTLSATARWLCPDCSILDSDVPPVPAPARNQLVAAMLAVENDASLTQHDKARKRQELLTGKAPADDDDDDEQENKSSLSDILSRSLNCSICIQLPERPVTSPCGHSFCLKCFEKWVRQGKRNCAKCRQIIPAKMTSQPRINSALVFAIRMARQASNSSGSGRGGVRSVNHFLHNQDRPDEPFTTERAQRSGRANAASGKIFVTVPTDHFGPITAENDPLRNQGLLVGESWRDRLECRQWGAHFVPVGGIAGQSDRGAQSVVLSGGYVDDEDHGEWFLYTGSGGKDLSGNKRTNKSHSFDQKFEKYNRALQVSCLQGYPVRVVRSHKEKRSSYAPETGVRYDGIYRIEKCWQIAGLQGFKVCRYLFVRCDNEPAPWTSDDHGDRPRPLPVIRELKKATVIHERTESPSWDFDEEDSRWKWKKPPPPSRQKVQNVEPVEVARAKSNKEVKKFQLKSIKEQLQRGFSCMICKEVMVSPVTTPCAHNFCKSCLEGEFAGQAFVKERSKGGRTLRSQKNVMKCPSCSIDISDYLQNIQVDIDLKSAIESLKAKVEEIGESVESSEDADGLQDDGAGKDEDTDSRNKNSVQELNGLPEGSDVGELEDTTNKEPDPAMKCNGKRKKGDYGNQSPDDKMEKRGKNYKTTEEELHEENDSSSSPLHPQ

SEQ ID NO: 32296 - protein, 223 aa, Glycine max
  Clone ID: TF_GmC251796_1.pep
GRRMRRKSRGKRRRAASATTLSPSSLSAIPILWDAYDTICIHCNNKGEEAKEDGLLICSGMGCPVAVHATCLATGPKFDGSGNFCCPYCWYKRAVDTCRRLREKALEAKGDLSRFLDNHDHARAAAHVDLVVQDSEELMEETGTQAQSKDNKDEEGEARVNQVHDREESETEPEENKEKEGKVRDDEELVEERERKTVTEAQSQENKDEEDKFQDDSEELVVE

SEQ ID NO: 32297 - protein, 88 aa, Glycine max
  Clone ID: TF_LIB3242-613-P1-J1-D12.pep
MEACTGLFAGTPNSNELVVIQGHDEPKPVKNLDGQLCEICGDSVGLTVDGDLFVACEECGFPVCMPCYEYERREGTQVCPQCHTRYKR

SEQ ID NO: 32298 - protein, 134 aa, Glycine max
  Clone ID: TF_jC-gmXLIB3563P056bc07a2.pep
MGDVVTVCDICGDQGFEEYLAICNKCPDGAEHIYCNDEKLEKVPDGDWWTCEDCRKSPGNELPTLGSQTEIEHAQCSPLLNSEFNGQLTNREVEKNVAIHDTRKRKNLGLLSKSVSFDNASSAKLNGKCSEVIA

SEQ ID NO: 32299 - protein, 828 aa, Glycine max
  Clone ID: TF_GmC838_1.pep
MEASAGMVAGSHKRNELVRIRHDSSDSGSKPMKNLNGQICQICGDTVGLTATGDVFVACNECAFPVCRPCYEYERKDGNQSCPQCKTRYKRHRGSPRVEGDEDEDDSDDIENEFNYAQGKAKARRQWEDDPDLSSSSRRESQQPIPLLTNGQTMSGEIPCATPDTQSVRTTSGPLGPSEKVHSLPYVDPRQPVPVRIVDPSKDLNSYGLGNVDWKERVEGWKLKQEKNMVQMTGRYTEGKGGDVEGTGSNGEELQMVDDARQPMSRVVPIPSSQLTPYRVVIILRLIILGFFLQYRVTHPVKDAYPLWLTSVICEIWFALSWLLDQFPKWSPINRETYLERLALRYDREGEPSQLDPVDVFVSTVDPLKEPPLVTANTVLSILSVDYPVDKVSCYVSDDGSAMLTFEALSETAEFAKKWVPFCKKHNIEPRAPEFYFAQKIDYLKDKIQPSFVKERRAMKREYEEFKVRINALVAKAQKMPEEGWTMQDGTPWPGNNPRDHPGMIQVFLGHSGGLDTDGNELPRLVYVSREKRPGFQHHKKAGAMNALIRVSAVLTNGAYLLNVDCDHYFNNSKALKEAMCFMMDPVLGKKTCYVQFPQRFDGIDLHDRYANRNIVFFDINMKGQDGVQGPVYVGTGCCFNRQALYGYDPVLTEEDLEPNIIVKSCWGSRKKGKGGNKKYSDKKKAMGRTESTVPIFNMEDIEEGVEGYDDERTLLMSQKSLEKRFGQSPVFIAATFMEQGGIPPSTNPATLLKEAIHVISCGYEDKTEWGKEIGWIYGSVTEDILTGFKMHARGWISIYCMPPRPAFKGSAPINLSDRLNPGPPWGL

SEQ ID NO: 32300 - protein, 214 aa, Glycine max
  Clone ID: TF_GmC838_2.pep
MEASAGMVAGSHKRNELVRIRHDSSDSGSKPLKSLNGQICQICGDTVGLTATGDVFVACNECAFPVCRPCYEYERKDGNQSCPQCKTRYKRHRGSPRVEGDEDEDDSDDIENEFNYAQGKAKARRQWEDDADLSSSSRRESQQPIPLLTNGQTMSGEIPCATPDTQSVRTTSGPLGPSEKVHSLPYVDPRQPVPVRIVDPSKDLNSYGLGNVDW

SEQ ID NO: 32301 - protein, 199 aa, Glycine max
  Clone ID: TF_GmC1270_1.pep
MTTKGTTHSEPNNTECCMCGDLGFSDQLFQCKACQFRSQHRYCSNLYPKPESLGTCNWCLSQREDTKERSTNSSNSSSSIRNNDDESRIKRIRNGNSYNSAQNIGPVKKGVKGSVLHLQIHKPIKKPKSPESSRSPSASNSPPKSSPVLVSTRKRIVTNGTLEERLRRTRSEDITRSGATKQVFRNKVRRYKLLDEVSS

SEQ ID NO: 32302 - protein, 118 aa, Glycine max
  Clone ID: TF_GmC216911_1.pep
PAFSLTSPSLSAIPILSDEHNNNAPTAFDTDCDDDNNALHHRGSEPEPEPELEPVDIFDKTICIHCDNKREEAEGVLICGGRGCPVAVHATCLGFEPEFDDSGNFCCPYCWYKRAVDT

SEQ ID NO: 32303 - protein, 101 aa, Glycine max
  Clone ID: TF_LIB3242-327-Q1-J1-E10.pep
MAPATTNSSPSAQRHVGFSRRTQAPRQLDGDSPPVKKYRMLSEIMARAPYAVVERETYSDLLCDQCGSGELPEELLLCDKCDKGFHMKCVRPIVVRIPIGS

SEQ ID NO: 32304 - protein, 586 aa, Glycine max
  Clone ID: TF_GmC760_1.pep
MEQLVRAIKMGLFEFSPQDELEGELVYFQHRLLQNAVAKKRHIDNLIYSVAKSLPHEIDKAHQQRWDEVIVNQYLRDLREAKKQGRKERKHKEAQAVLAAATAAAAASTRALRKDNLDESMQQENLLKLDTLNGRTGACSQPMSRAKRRQKGVAVTRTSSEKYSEFCMPTSDLSKEQCKSCDICRRSEFILNPILVCSGCKVSVHLDCYRSVKETTGPWYCELCEDLSSRSSGAAAINFWEKSVVECALCGGTTGAFRKSSDGQWVHAFCAEWVFESTFKRGQIDAVEGMETLQKGVDICCICHHKHGVCMKCCYGHCQTTFHPSCARRAGLYMNVRPTGGKAQHKAYCEKHSLEQKAKAETQKHGIEELKSIRQIRVELERLRLLCERIVKREKIKRELVISSHDILAFKRDHVARSVLARSHFILPDGSSESATTSLKGNTEGYRSCSEPLQRSDDVTVDSSVSAKRRVRVAISMDTDPKLDDDCSTSQSRYNHKILDRSQFSGKKVPQRAAASRNISDEGGWRSKSRKHSETFGKELVMTSDEASMKNSMLPKGYAYVPADCLSNEKHSNEDVYASEPVEHDR

SEQ ID NO: 32305 - protein, 881 aa, Glycine max
  Clone ID: TF_GmC4344_1.pep
MESFFTEVTAYPPAHVVHEKLSEMKMDNNNADDKMPIAEPVKYDEPANLARPENIKTEKETGQDRKENVVQTSENAAGTKSGKPKIKGVSLTELFTPEQVREHITGLRQWVGQSKSKAEKNQAMEHSMSENSCQLCAVEKLTFEPPPIYCTTCGVRIKRNNMYYTTGTGDTRHYFCLPCYNDARTENIIVDGTPIAKSRLEKKKNDEETEEWWVQCDKCEAWQHQICALFNGRRNDGGQAEYTCPNCYIQEIERGERKPLPQSAVLGAKDLPRTILSDHIEQRLFKRLKQERLERARLQGKSYDEIPGADALVVRVVSSVDKKLEVKPRFLEIFQEENYPTEFPYKSKVVLLFQKIEGVEVCLFGMYVQEFGSECQFPNQRRVYLSYLDSVKYFRPEVKAVTGEALRTFVYHEILIGYLEYCKKRGFTSCYIWACPPLKGEDYILYCHPEIQKTPKSDKLREWYLAMLRKAAKENIVVDLTNLYDHFFVSTGECRAKVTAARLPYFDGDYWPGAAEDLIYQLRQEEDGRKQNKKGTTKKTITKRALKASGQSDLSANASKDLLLMHKLGETICPMKEDFIMVHLQHACTSCCILMVSGNRWVCRQCKNFQICDKCYEAELKREEREQHPINQREKHTLYPVEITDVPSDTKDKDEILESEFFDTRQAFLSLCQGNHYQYDTLRRAKHSSMMILYHLHNPTAPAFVTTCNICRLDIETGQGWRCEVCPEYDVCNACYQKDRGADHPHKLTNHPSMADRDAQNKEARQLPVLQLRKMLDLLVHASQCRSAHCQYPNCRKVKGLFRHGMHCKIRASGGCVLCKKMWYLLQLHARACKESECHVPRCRDLKEHLRRLQQQSDSRRRAAVMEMMRQRAAEVANSSG

SEQ ID NO: 32306 - protein, 371 aa, Glycine max
  unsure (1)..(371): unsure at all Xaa locations
  Clone ID: TF_GmC832_1.pep
DNLDVVSCSVCQMGVLIRHPHKCNACQGYCHEGCSTRSTVSANEVEYLTTCKQCYHARLLAQKENTNESPTSPLLLQGRENNSGTFLNGSRPKSHDQVLKSSRTKANNPNVKQVTPVTALKXTKAKYYEQEPTSTRTKDNNHFGTPQVASEATLTGKKPRKNCSWGIIWQKKNNEDTDNDFWLRNILLKGGSNMPQLKPVCHLCRKPYMSDLTYICCETCRNWYHAEAVELEESKISSVLGFKCCKCRRIKSPVCPYSDLKPKRQEGKKSRTRTKKKEHSGADSDSGAIYYDMRDCEVATPVFHVEDDPSHVFPVEGDPTHVFPXRDDPLLFSLSSVELLTEPKMEGDVEWNSVPGPGLRKLPVRRNVSIE

SEQ ID NO: 32307 - protein, 154 aa, Glycine max
  unsure (1)..(154): unsure at all Xaa locations
  Clone ID: TF_GmC154798_1.pep
KKKRQRNNIDVDDASRLRRRTRYLLIKMKLEQNLIDAYSGEGWKGQSREKIRPEKELLRAKKQILKCKLSIRDAIHQLDSLSSVGSMXDSAIAPDGSVYHENIFCANCKLHEAFPDNDIILCDGTCNRAFYQRCLNPPLDTENIPPGDQGLFCK

SEQ ID NO: 32308 - protein, 452 aa, Glycine max
  unsure (1)..(452): unsure at all Xaa locations
  Clone ID: TF_GmC28830_1.pep
ISHKRGMKLRLMNGIAYNETWFGSWGYKFGRGCFGVTQSMYHKAIQAIRSMSLYLIIHHIANSSHGIPLIFSRNQTLSDQSLVTLGDLFCYMLDLKSCLPRETXISSYKTNALVETNCRWSPKRIEMATRVIVEALKRTEFKWVSRQEVRDAARAYISDTSLVDFVLRSLGNHVEGNYLVRXSLNLVTKVLEYCLEDISDVYPYNEGLVMSNKVXTSIRRAQLMKDMLYLYKYILIDXKPIMRSEFLSAIPLAARIILGTKYFIKDYFGDIPHQVELGSDDKLNIYCTIWLRNNVGSGXYLNKAIMPPHECITLKRNATINDLKLEVERDFREICXELRSFMVESFGNLSVNNETMAFGLIEVGGKVVLEGWHGXHMNXMIEQICESDMNNGIMDCTCGTIEDDGERMVSCDICEIWQHTRCVXIPNDEEIPHIFLXCKKCEQEIVLFPSLP

SEQ ID NO: 32309 - protein, 136 aa, Glycine max
  unsure (1)..(136): unsure at all Xaa locations
  Clone ID: TF_LIB4167-058-R1-N1-G3.pep
LKSYGHCWYCPSCLCRVCLTDXDDDXIVLCDGCDHAYHIYCMKPPRTSIPRGNWFCRKCDAGIQAIHQAKKAYEFNKPRRNGEDAAKPNANLEKKXHNKRARELESGGAMDMLLTAANTLNFEEKEAASHIKLQRT

SEQ ID NO: 32310 - protein, 673 aa, Glycine max
  unsure (1)..(673): unsure at all Xaa locations
  Clone ID: TF_GmC697_1.pep
MGYVHDGDLDLYTRNMELKMSKKVVPNCYPTNVKKLLSTGILDGAVVKYIYNPGKVELQGIIDGGGYLCGCSMCNYSRVLSAYEFEQHAGAKTRHPNNHIFLENGRPIYSIIQEIKTAXRDEVIKNVAGSSVNEESFQAWKESLLQSNGKVQAHKSYSTKLVGMPHTNISQSVESTSHLSSLHVPSHYEQHMYMNQTTDEWKRVVKKPSSYTSNSGVLQKRSADGCTKRRDNDLHRLLFMPNGLLIVSEFSYYVKXCKLLGGYKQGNGIVCGCCDIEISPSQFEAHAGMAARRQPYRHIYTSNGLTLHDIALSLANGQNLTTGDSDDMCAVCGDGGDLILCNGCPRAFHAACLGLQCVPDSGWQCLNCIDNAGNGRESSIVRPIMIRLTRVDKTPEVEMGGCVVCREHDFSVAKFDERTVIICDQCEKEYHVGCLRDMGLCELEELPKDKWFCCDDCNRIYAALQNSVSAGAEIIPASFSELIIRKHEDKGLCTYGAMNDIQWRILSGKSRYPEHLPLLSRAAAIFRECFDPIVAISGRDLIPVMVYGRNISGQEFGGMYCIVLIVNYVVVSAGLLRIFGRNVAELPLVATSRAHQGKGYFQVLFSCIERLLSSLNVEKLVLPAAGDAESIWTKKLGFRKMSEDQLSKHLREVQLTLFNKTSMLEKTVQLAIE

SEQ ID NO: 32311 - protein, 387 aa, Glycine max
  unsure (1)..(387): unsure at all Xaa locations
  Clone ID: TF_GmC24_1.pep
ENFQGMKPESVLDFSRVNSRMKEQAYEQSPTLFLSDIQQVWRKLQDAGNEIVALAKSLSNMSRTSYSELVGIPAQSTFQDEKQVEFDCCMKPEQTQACAMYKICSCKCCGEKADDTDCLVCDSCEEIYHVSCIEPAVKEIIPHKSWYCANCTANVIESLHENCVLCERLNDAKTLDDVIGDGSFPTIEETQNEFEENSNCTSDGIQVSIGEEKTPNCKICENEVDGGKIKICGHRFCSNKYYHVRCLTINQLKSYGHCWYCPSCLCRVCLTDQDDDRIVLCDGCDHAYHIYCMKPPRTSIPRGNWFCRKCDAGIQAIHQAKKAYEFNKPRRNGEDAAKPXANLEKKHNNKRARELESGGAMDMLLTAANTLNFEEKEAASHIKLQRT

SEQ ID NO: 32312 - protein, 317 aa, Glycine max
  Clone ID: TF_GmC1699_1.pep
MPSSHLGRNASSLALPKVERPQFKVDGGSNGSPYMLQVQANSSANQPLVNAPTWSIQTQAASLARSASENKVPVHNSVKVEGTPDATVSRAGTQITTDSSFRPFITQTAPGNLPSVHQPLPRTNIVQAPLIPSHTDIAKIVQKVLQPKLPVHPTWTPPSRDYMNKAFTCQMCELSVNEVDTVLLCDACEKGFHLKCLQPSVLRGIHNRVDWHCMRCLSLSGGKPLPPKYGRVMRSSNTPPKLPSNTGGVQPCSEKKVENIDPKVIPQTLATNGSSVPTVSGGHHNVELPSESKIPDTKDMQGTGISSTIEAIDKKPD

SEQ ID NO: 32313 - protein, 252 aa, Glycine max
  Clone ID: TF_GmC7106_2.pep
MDGGGVNYNPRTVEQVFRDFKGRRAGMIKALTTDVEEFFQQCDPEKDNLCLYGFPNEQWEVNLPAEEVPPELPEPALGINFARDGMQDKDWLSLVAVHSDAWLLAVAFYFGARFGFDNADRKRLFSMINDLPTIFEIVTGSAKKQTKEKSSISNHSSNKSKSGSKGRGSESGKYSKETKDEEEEVLDEEDDEEHEETLCGACGEHYASDEFWICCDICEKWFHGKCVKITPARAEHIKQYKCPSCSNKRARP

SEQ ID NO: 32314 - protein, 153 aa, Glycine max
  Clone ID: TF_GmC931_2.pep
TVLAIAFYFGARFGFDKADRKRLFNMINELPTIFEVVTGAAKKQVKEKSSVSNHSGSKSKSSSKQRASESQARQPKPLQSKEEDEELDDQDDDEHGETLCGACGEHYGTDEFWICCDICEKWFHGKCVKITPARAEHIKQYKCPSCSNKRARP

SEQ ID NO: 32315 - protein, 257 aa, Glycine max
  unsure (1)..(257): unsure at all Xaa locations
  Clone ID: TF_9985993.pep
KFNVVVSSEDGEKGEDENKDGEAVESEDELLVIEAIDDVAVEQAPPQDDKSQDISDSSVSLEWFLGCRNRVSLTSERPTKKRRLLGVEAGLEKVVMTCPFDEGQLFCHYCGRGDTGRDSNRLIVCASCKVAVHRKCYGVHDDIDEAWLCSWCKQKVDVDVSVNPCVLCPMKGGALKPVNSSXEGVGSVPFVHLVCSLWXPEVYIDDLKKMXPVMNXGEIKETPKKLMCXXCKAKCGACVPWNHGTSXLLSSLCPREA

SEQ ID NO: 32316 - protein, 239 aa, Glycine max
  Clone ID: TF_GmC52662_1.pep
MSFLEEFHANLDSLPVILRKKYTLLRDLDKSLQDIKRQNEQRCEQEIEDIKRGVRSGNITPDTSAIRFSDEALDEQKHSIRVADEKVALAVQAYDLVDTNIQQLDQYLKKFDEEIRRERENAAITGVPASGPEGNTKSGRGNESGTGRGGRKKTRQTTMVTEAQATSNPTGMDLELPVDPNEPTYCFCNQVSYGAMVACDNPNCKIEWFHFGCVGLKEQPKGKWYCSNCAATKNRRRSK

SEQ ID NO: 32317 - protein, 97 aa, Glycine max
  Clone ID: TF_GmC52662_3.pep
FQRGGRKKTRHTTVTPAATEAQATANPTGMDLELPVDPNEPTYCFCNQVSYGAMVACDNPNCKIEWFHFGCVGLKEQPKGKWYCSNCAATKNRRRSK

SEQ ID NO: 32318 - protein, 251 aa, Glycine max
  Clone ID: TF_GmC931_4.pep
MDSRTYNPRTVEEVFRDFKGRRAGLIKALTTDVEDFYNQCDPEKENLCLYGFPSEQWEVNLPAEEVPPELPEPVLGINFARDGMQEKDWLSLVAVHSDAWLLAIAFYFGARFGFDKADRKRLFNMINELPTIFEVVTGAAKKQVKEKSSVSNHSGSKSKSSSKAQASETQGRQSKALQTKDEDEELEEQDNDEHGDTLCGACGENYGTDEFWICCDICEKWFHGKCVKITPARAELIKQYKCPSCSNKRAR

SEQ ID NO: 32319 - protein, 494 aa, Glycine max
  unsure (1)..(494): unsure at all Xaa locations
  Clone ID: TF_GmC1724_2.pep
SDRVLLVSACASFVVVVIDFPVCDSRDSSRAELLGLTAWIWYRASRKLNYFRIKELKDVLTQLHLSKQGKMIWYLTIRSXKSIIVLHICCNLLSLTLLSXLFTFLYFLLCRKMQISGATDLASKGQGASDSSSVKVKSEFDDAFQPDVKIRCLCGSRLETENLVKCDDARCHVWQHISCVIIPEKPTEGIPLVPDKFYCELCRLTRADPFWVSVAHPLHPVKLTTTSNPTDGNNPVQSVERTFQLTRADKDLVSKPEFDVEAWCMLLNDKVPFRMQWPQYTDLQVNGVPVRATNRPGSQLLGANGRDDGPIITPYTKDGINKISLARGDARIFCLGVRIVKRRSMQQILNSIPKESDGEKFEDALARVCRCVGGGNAVDDADSDSDLEVVSDTFTVNLRCPMSGSRMKIAGRFKPCIHMGCFDLEVFVEMNQRSRKWQCPICLKNYALENIIIDPYFNRITSMMMNCGEEIAEIEVKPDGSCRVRXKSESERLE

SEQ ID NO: 32320 - protein, 140 aa, Glycine max
  Clone ID: TF_uC-gmrominsoy277f07b1.pep
MIWYLTIRKMQISGATDLASKGQGASDSSSVKVKSEFDDAFQPDVKIRCLCGSRLETENLVKCDDARCHVWQHISCVIIPEKPTEGIPLVPDKFYCELCRLTRADPFWVSVAHPLHPVKLTTTSNPTDGNNPVQSVERTF

SEQ ID NO: 32321 - protein, 151 aa, Glycine max
  Clone ID: TF_jC-gmro02910013g08a1.pep
MDLVASCKEKLQHFRIKELKDVLTHLGLSKQGKKQDLVDRILAILSEDQVSKLWTKKNAVGKQEVAKLVDDTFRKLQVSGAIDLASKGQGASDSSNVKIKGEIDDSYQSDTKIRCLCGNVFDTEPLVKCEDTRCHASQHISCVIIPEKPMD

SEQ ID NO: 32322 - protein, 198 aa, Glycine max
  Clone ID: TF_GmC2696_3.pep
MAMAEDTEEKSAAVSGGKRRRGAGKNAKATGRVASRKKMEEDVCFICFDGGDLVLCDRRGCPKAYHPSCVNRDEAFFRAKGKWNCGWHLCSNCERNASYMCYTCTFSLCKGCIKDAVILRVRGNKGFCETCMRTVMLIEQNEQGNNVGQIDFDDRNSWEYLFKDYYIDIKKKLSLTFDELTQAKNPWKGSDMLLSKEE

SEQ ID NO: 32323 - protein, 240 aa, Glycine max
  unsure (1)..(240): unsure at all Xaa locations
  Clone ID: TF_GmC5215_1.pep
MEMASTPRTVEEIFKDYTARRTAIVRALSQDVDEFYGLCDPDKENLCLYGHPNETWEVTLPAEEVPPELPEPALGINFARDGMNRRDWLSLVAVHSDSWLLSVAFYLGARLNRNERKRLFSLINDLPTVFEVVTDRKXPVKDKPTADSGSKSRGSTKRSSDGQVKSNPKFADEGYEEDDDEHNETLCGSCGGNYNADEFWIGCDICERWFHGKCVKITPAKAESIKQYKCPSCSLRRGRP

SEQ ID NO: 32324 - protein, 239 aa, Glycine max
  Clone ID: TF_GmC5215_2.pep
MDMASSPRTVEEIFKDYGARRTAVIRALTHDVDEFYGLCDPDKDNLCLYGHPNEAWEVTLPAEEVPPELPEPALGINFARDGMNRRDWLSLVAVHSDSWLLSVAFYLGARLNRNERKRLFSLINDLPTVFEVVTERKPVKDKPTADSGSKSRGSTKRSSDGQVKSNPKFADDGYEEEDDEHSETLCGSCGGNYNADEFWIGCDICERWFHGKCVKITPAKAESIKQYKCPSCSLRRGRP

SEQ ID NO: 32325 - protein, 297 aa, Glycine max
  Clone ID: TF_GmC37050_1.pep
MLIQTSVLSSVEAGLCYVSDDGKDVLCDRMPSGETWQVGLKCNKYPLDWCRKAEPVEEDKRNADDPRAASARGSFGQPSTASIMTENTTPNMVYRRKKLCKDSNFDLGPTNVQASANCPSVISSAAHLSSAEDQPTGFQVKHEIEMVKDPTMPSVLFDRVAKDSTHKNLGINSVNDSCSSSKPNMETEMDETGECSSSIIVMDCTREEVTEKDFCINILRSHGLLKEDSPVDNVASGEDAVTTGNNCCSRSCKICGDLDSSLNMLLCDHCEDAYHLSCYNPRLKKLPIDEWFCHSCR

SEQ ID NO: 32326 - protein, 514 aa, Glycine max
  Clone ID: TF_GmC1309_1.pep
MENKSDMGSSTPQDPHGSDDISSSLANEMNDECSDASQELNNQVLVDGIICSKSHSGEMMSDPVSDKCISPSRTSHSELEMKNKVVAAPPCGICGDGGDLICCDGCPSTFHQSCLDIQMLPPGEWHCPNCTCKFCGIASGTSDKDDASVYILQTCILCEKKYHNSCTKEMNTLPNKINSSSLSFCGKECKELSEHLKKYLGTKHELEAGFSWCLIHRLDEDSEAACRGLSQRVECNSKLAIALTVMDECFLPVIDRRSGINLIRNVLYNSGSNFSRLSYSGFYTATLERGDEIIASASIRFHGTQIAEMPFIGTRHIYRRQGMCRRLFSAIESALCSLKVEKLVIPAIAELTHTWTTVFGFTYLDESLRQEMKSLNMMVFPGIDMLQKLLVEQGNREGSEKMENGNNDFIKTKMGNRSDMGFSTPQGPRGSDDVSSNPANETNDECSDASQELYNQVLVDGIICSQSHSEEMMSDPISDKCDSPSRTSHSELKIEVIHVPQKKTLTRSVTRPLL

SEQ ID NO: 32327 - protein, 442 aa, Glycine max
  unsure (1)..(442): unsure at all Xaa locations
  Clone ID: TF_GmC121288_3.pep
HASATRTGEAVVDIQDRLPEARVVYCSATGASEPRNMGYMVRLGLWGDGTSFTDFREFLGALDRGGVGALELVAMDMKARGMYLCRTLSYEGAEFEVIEAPLEDKMMDMYKKAAEFWAELRVELLSASAFLNDKPNSSQLWRLYWASHQRFFRHICMSAKVPAAVRLAKQALVEEKSVVIGLQSTGEARTEEAVTKYGSELDDFVSGPRELLLKFVEENYPLPEKPELLPGXEDGVKELQRKXRHSATPGVSVKGRVRKVAKWQPPSDAESDEESESDSGIESTDSDDEFQICEICTTEEERKKLLQCSCCSKLVHSTCLMPPIGDIVPEEWSCHLCKEKTDEYLQARQAYIAELQKRYDAASERKTKILDIIRALDLPNNPLDDIVDQLGGPDKVAEMTGRRGMLVRASLEKGVTYQARNTKDXTMEMVNMHEKQLFMGCK

SEQ ID NO: 32328 - protein, 433 aa, Glycine max
  unsure (1)..(433): unsure at all Xaa locations
  Clone ID: TF_GmC1708_1.pep
KTTACKDAETKKYVSELNAEEDDVDGNGDECRLCGMDGTLLCCDGCPAVYHSRCIGVMKMHIPEGAWYCPECKIDMIGPTIARGTSLKGAEVFGKDLYGQVFMSTCNHLLVYXTSFVDGFCLKYYNQNDIPRVLQVLYASEQHRPIYNGICMAMLEYWNISEKFLPICVSRLTPMVEEEHKAVSSVKEEYSLMFGNGICGDNLVPSLDASLVTTRSPAPGSSGNARTTCKGSLTNDFVYMGCSYKPQSYINYYMHGDVAASAAANLAVLSSEDSRSEGHVSGNLGKATSGNTYLLAKAFSQTASRFFWPSSEKKLVEVPRERCGWCISCKASVSSKKGCMLNHAAISATKSAMKILSGLAPVRSGEGIIPSIATYVMYMEESLRGLIVGPFLSECYRKHWRKQVERAKSFSDIKPLLLKVSDCYFESRRFINF

SEQ ID NO: 32329 - protein, 982 aa, Glycine max
  Clone ID: TF_GmC256_1.pep
MGNTNSSGQKPALHGDISESKKLTSDLRAPSASAVGVAHSNEKLRTVSYSTKNQNGFTLPRILDESSGREGNNCDNNKVKRASKGVKSISVEVSGKGNDFIKEDEPISLLPQKRINEASFTKLKSRKKTCVPSANGKSQGLKVTSQVDEPPEVDDYFSIGKDGINNSNTCLVLKPSGSTSNSLAFDELFSRNANPESVQCDNVCQNSPKTAVQSLSESKINGKPDITDSGMQQVDGDEAEQHNVTRNLDCSSLGNKKSCNVESAGCTKLDLITEESNKLVRNSPRKKSVAKRSLGSKPKLGATAKQKKSLSLTKTSLQGEGVTCSSGSKEIATCDAKMHQGCPKIFDVNKTTEQEIVGKNAEDAGDRTEFLDDETEAPDDKCEYELGMALDEDLVHLSKKPYTAKEEKSEAICPATKCEEAMPPKKGTNKTEKQKTSSLPVKHQARKGSAGKVKATVSKYAEDDGDRTELVNDEIEAPDDKCEYELRMALNEESHLSKKSDTATEEKSEVICPATKCEETMPPKKGTKKTEKQKPSSLVVKNQARKCPAGNAKATVAKELSKSNMAVSGEKIPNETGHEPEIETMEEMSLPDDKSDESAVQRNKSENFSEEKENKPIDGEQGRSNGNPTIKSSVRPAKIKSKKSGLNPSITESNTRVKTEAACFILSGHRLQRKEFQQVIKRLKGRVCRDSHQWSYQATHFIAPDPIRRTEKFFAAAASGRWILKTDFLTASSQAGKLLAEEPYEWHQNGLSEDGTINMEAPRKWRLLKERTGHGAFYGMRIVVYGDCIAPPLDTLKRVIKAGDGTILATSPPYTRFLGTGIDYAVVSPGMPRVDTWVQEFLKHEIPCVVADYLVEYVCKPGFSLERHVLYGSHAWAEKSFDKLKSKAEEIVEELVAPEDSRDDDIICKVCGSRDRGDVMLICGDESGSVGCGIGTHIDCCDPPLTAVPEEDWFCPKCSSTRNCSNKPSKRKKTVLSSSKCT

SEQ ID NO: 32330 - protein, 424 aa, Glycine max
  Clone ID: TF_GmC310_1.pep
NCLRSWGRNRDLFHWSSWTCPLCRICEACRRTGDPSKFMFCKRCDGAYHCYCLQPPHKSVCNGPYLCTKHARCHSCGSNVPGNGLSVRWFMSYTNCDACGRLFTKGNYCPVCLKVYRDSESTPMVCCDSCQLWVHCQCDNISDEKYHQFQLDGNLQYKCPTCRGECYQVKNPEDAAREIWRRRNIAERDLIASLRAAAGLPTQEEIFSISPFSDDEDSGPLKLKSESARSFKFSLKNLANDSPKKKSSSKKTAKKKDSQLFMTSKIDTHNSCEGHSDIKSLHSLDDDKNDDIQSQRNEGPDVYSSPATGSLSQTEASFPINQPGILKQKFVDEVMVSDEERKPRVVRIKSNKALIPDSEEESGKHSLKTQNVKGKKLVINLGARKINVASSPRSDTSSCQKDQDPVTVNGNDDSFCWSCHYIFA

SEQ ID NO: 32331 - protein, 58 aa, Glycine max
  Clone ID: TF_GmC126_7.pep
VFCRYHPACVGMTIEEAKKLEHFVCSECSSDDDMKKPHATFSVSPGSDVKVEPKRRKR

SEQ ID NO: 32332 - protein, 252 aa, Glycine max
  Clone ID: TF_701130201_FLI.pep
MEGVPHPIPRTVEEVFTDFKGRRAGLIKALTTDVEKFYQQCDPEKENLCLYGFPNETWEVNLPVEEVPPELPEPALGINFARDGMQEKDWLSLVAVHSDSWLLAVAFYFGARFGFGKNERKRLFQMINDLPTIFELVTGSARQSKDQPAAHNNGSKCKSSGKSRQSESQAKGMKMSAPPKEEDESGEEEEEDDEQGATCGACGDNYGTDEFWICCDMCERWFHGKCVKITPAKAEHIKQYKCPSCSNKRVRV

SEQ ID NO: 32333 - protein, 252 aa, Glycine max
  Clone ID: TF_GmC121_1.pep
MEGVPHPIPRTVEEVFTDFKGRRAGLIKALTTDVEKFYQQCDPEKENLCLYGFPNETWEVNLPVEEVPPELPEPALGINFARDGMQEKDWLSLVAVHSDSWLLAVAFYFGARFGFGKNERKRLFQMINDLPTIFELVTGSAKQSKDQPAAHNNGSKCKSSGKSHQSESQAKGMKMSAPPKEEDESGEEEEEDDEQGATCGACGDNYGTDEFWICCDMCERWFHGKCVKITPAKAEHIKQYKCPSCSNKRVRV

SEQ ID NO: 32334 - protein, 91 aa, Glycine max
  Clone ID: TF_jC-gmXLIB3563P058ah04d2.pep
QSRQSESQAKGMKMSAPPKEEDESGEEEEEDDEQGATCGACGDNYGTDEFWICCDMCERWFHGKCVKITPAKAEHIKQYKCPSCSNKRVRV

SEQ ID NO: 32335 - protein, 355 aa, Glycine max
  Clone ID: TF_GmC3892_3.pep
RPGKELLWPKLDILRRKLKSRGLFQSVDSLCAEGKFPESLFDSAGEIDSEDIFLRLREDDRRGTNNDIILCDGVCDRGFHQLCLDPPLLTEDIPPGDEGWLCPGCDCKDDCMDLVNDSFGTSLSISDTWERVFPEAASFAGNNMDNNLGLPSDDSDDDDYNPNGSDDVKIEGDESSSDESEYASASEKLEGGSHEDQYLGLPSEDSDDGDYDPDAPDVECKVNEESSSSDFTSDSEDLAAAIEDNTAPGQDGLIMFGEHIFIFIVKLAICHEFSLRLANGSTIHVGASGIHHKWKPILVEMLHRKLPMAGLKMRGRSNVNQCLRRSVEKTLKPQALENGSICQNPYLKHSWISMA

SEQ ID NO: 32336 - protein, 228 aa, Glycine max
  unsure (1)..(228): unsure at all Xaa locations
  Clone ID: TF_GmC931_1.pep
MEALSRSVEEIFEDFQGRRAGIIKALTTDVEDFYSQCDPEKENLCLYGFPNEQWEVNLPVEEVPPELPEPVLGINFARDGMLEKDWLSLVAVHSDTWLLALAFYFGARFGFDKTDRKRLFGMINELPTIFEVVTXAKKQVKEKSSVSNNSGSKSKSNSKAIICVLIKLLAGGAAGFRNPGQTIKAITTKILHLHNFCVRDTERRQRHTTPFYFCHFKHRKYMFYYRVH

SEQ ID NO: 32337 - protein, 168 aa, Glycine max
  unsure (1)..(168): unsure at all Xaa locations
  Clone ID: TF_GmC259_1.pep
MSSLGSPKKRLRSQTAEENKEEVVCCGICYAERGVSITGEIDCCSHHFCFVCIMEXGPIFRQRFSYVRWLPMHGVFSSSRDVKVYHPHGNMATGPADSYTETKCGVCHAGTDEHLLLLCDLCDTASHTYCVGLGYTVSDGDWFCHDCAISRETNINEESDQQKFCATC

SEQ ID NO: 32338 - protein, 334 aa, Glycine max
  Clone ID: TF_GmC1473_1.pep
MASSLGRRRTHAPKSSSTLNDDVSCEECGGGHSPSKLLLCDKCDRGYHLFCLRPILPSVPKGSWFCPSCSNHKPKSFPLVQTKIIDFFRIQRSPEALSNQDTRRKRKRGGGLVVSKKKRKLLAFVPSEDPNRRLEQMASLATALTTTKTEFSNQLTYMLGMAPRSANRPALERGGMQVLSKEDTETLNLCKRMMERGEWPPLMVVFDPLEGFTVEADRSIKDLTIITEYVGDVDFLKNRENDDGDSIMTLLSASDPSRTLVICPDKRSNIARFINGINNHTPEGKKKQNLKCVRFDVGGECRVLLIANRDITKGERLYYDYNGDEHEYPTEHFV

SEQ ID NO: 32339 - protein, 256 aa, Glycine max
  Clone ID: TF_GmC727_1.pep
MEAGYNPRTVEEVFRDFKGRRAALIKALTTDVEEFYQQCDPEKENLCLYGFPSEQWEVNLPAEEVPPELPEPALGINFARDGMQEKDWLSLVAVHSDAWLLAVAFYFGARFGFDKADRKRLFNMINDLPTIFEVVTGMAKKQGKEKSSVSNHSSTKSKSNSKRGSESKYTKAMQSKDEDDEGGAGLGLGLEDEDEEEHGDTLCGACGESYAADEFWICCDICEKWFHGKCVKITPARAEHIKQYKCPSCSNKRARP

SEQ ID NO: 32340 - protein, 251 aa, Glycine max
  Clone ID: TF_GmC727_2.pep
MDAGYNPRTVEEVFRDFKGRRAALIKALTTDVEEFYQQCDPEKENLCLYGFPSEHWEVNLPAEEVPPELPEPALGINFARDGMQEKDWLSLVAVHSDAWLLAVAFYFGARFGFDKADRKRLFNMINDLPTIFEVVTGMAKKQGKEKSSVSNHSSTKSKSNSKRGSESKYTKAMQSKDEDDEGVGVEEEDEDEHGETLCGACGESYAADEFWICCDICEKWFHGKCVKITPARAEHIKQYKCPSCSNKRARP

SEQ ID NO: 32341 - protein, 391 aa, Glycine max
  unsure (1)..(391): unsure at all Xaa locations
  Clone ID: TF_GmC86936_1.pep
MATATTNSSPSAQRHVGFSRRTQAPRQLDDDSPPVNKYRLLSEIMARAPYAVLERETYSDLLCDQCGSGELPEELLLCDKCDKGFHMKCVRPIGARVPIGSWLCPNCQGGKRVRTFSHKKITXEYPLQINIKNMMSKHYHIISDWNFFFLIXCSELLDAKKRKKCSRPLVLHKKKRRLLPFVPTKDLNRRLKQMGSLASALTALNMEFSDHLTYLPGMAPRCANQALLENGGMQTLSKEDMETLEQCIALSKRGEFPPFMVVYDSREGYTVEADDLIKDMTIIAEYTGDVDYLDTRERDDCDSMMTLLLGAESSQSLVICADKRGNIARFISGINNHTQEGRKKQNCKCVRYNVNGECRVFLVAIRDISKGERLYYDYNGHEYQYPTHHFV

SEQ ID NO: 32342 - protein, 375 aa, Glycine max
  Clone ID: TF_GmC1161_1.pep
RKYSAKDNDDLCIVCWDGGNLLLCDGCPRAFHKECAALSSIPRGDWYCQFCQNMFQREKFVAHNANAVAAGRVEGVDPIEQIANRCIRIVKDIEADLSSCALCRGVDFSRSGFGPRTIILCDQCEKEYHVGCLRDHKMAYLKELPEGNWLCCNDCTRIHSTLENLLVKGAERLPESLLGVIKKKQEEKGLEPIIDVRWRLLNGKIASPETRPLLLEAVSIFHECFNPIVDAASGRDLIPAMVYGRNVRGQEFGGMYCALLIVNSSVVSAGMLRIFGSDVAELPLVATSNGNHGKGYFQTLFSCIERLLAFLNVKNLVLPAAEEAESIWTDKFGFSKMNPDELTNYRKNCHQMVSFKGTNMLHKMVPSCRVINNQS

SEQ ID NO: 32343 - protein, 576 aa, Glycine max
  Clone ID: TF_GmC6778_1.pep
KYFTCKNCRGCFPSSNVERVGLLCLSCVESRKSEKSSIHAVGKRIRSPRPVLFSRSCSCCASESELCITPQTKKQWKTRTKSSKLSVKLKTAPITSKCLSPQNKSQWRISKRYQRLHKLIFEEDGLPNGAEVAYYARGQKLLEGIKTCSGIVCRCCNTEISPSQFEVHAGWASRRKPYAFIYTSNGVSLHELAIFLSKDHKCTTKQNDYVCVVCWDGGNLLLCDGCPRAFHKECASVSSIPRGEWYCQICQHTFLRERPVLHNADAVAAGRVEGVDPIEQIAKRCIRIVKDIGAEMGGCVLCRSSDFSRSGFGPRTIIICDQCEKEYHVGCLRDHKMAYLKELPEGDWFCCNDCTRIHSTLENLLIRVAERLPESLLDVIKKKQVGRCLEPLNEIDVRWKLLNGKIASPETRPLLLEAVSMFHECFDPIVDPAAGRDLIPAMVYGRNLQTQDFGGMYCALLIVNSSVVSAGMVRIFGRDIAELPLVATRYKNRGKGYFQTLFACIERLLAFLNVKNLVLPAAEEAASIWTEKFGFSKMKPNQLTNYRMNCHQIMAFKGTNMLHKTVPQCRVINTQL

SEQ ID NO: 32344 - protein, 541 aa, Glycine max
  unsure (1)..(541): unsure at all Xaa locations
  Clone ID: TF_GmC1266_1.pep
SSRIGSRKKEKCEDEDNFMDNGTTIGTTTGRKRGQKRRRVLLSDSDYASSGSSDFEFTISEEEREQVREAKRLCGNLRNNLRSSSHPINKKRLESMSINXPQRKPPARKGKEKIEEPLGRKGKEKVEDLKSKGKQTCGICLSEEDKRRVRGVLNCCTHFFCFACIMEWAKVESRCPLCKQRFKTISKPARSTTGIDLREVVIQVPERDQVYQPSEEELRSYIDPYEYVICSECHQGGDDGLMLLCDICDSPAHTYCVGLGREVPEGNWYCDGCRPVALGLQEVQRREGVADPRVSVQSHPVRPPPVLHVRESIDLNLISSPRAAFNQGFGHLPSSRFSGRSAEGASPVSGGAPTLSERRWIHRQIQQLLSIDRMASTPGRTNGISATSSTSNLYSSHFDQSRGTTTLHARTQDVGTSYHTFFDERLCNNSSPLMQNGALWPGLMGTTPVPDCELAHQFSRSNIVPDSGLSPAIREESNFHIAKEQLQSMVKSHLKNLSQNIDLVKYILSSCGHRYCNSYLFSLPSSYGEGRIVATFGTQNT

SEQ ID NO: 32345 - protein, 213 aa, Glycine max
  Clone ID: TF_GmC38836_1.pep
MVYLSPLALSCKSCLREIVIHASANVDEDISIVSEKLATAVKASKVAIVYDPHDICDLELTLAKNFWKIQVNRLLNGLPKPTIQQIQKHLKEGLAMDISPEDHYMLKLTNVNCLGLQWAELAKKVATDSGALSLDKVFELVVVGENLPVDMNEELRILRARCMLYCICRKPFDPERMIACYHCNEWYHFDCMKLPCTEEVYICPACNPCTETC

SEQ ID NO: 32346 - protein, 700 aa, Glycine max
  Clone ID: TF_GmC4485_1.pep
METEGGNGVAEGEVWTLKNGVINSGVAIADGSAAAEDGEVSGSKNEVNGVAFADGNGVTEHGEVWGSKNEAVNNEVAIVDGNGVAYGGEVHGSKNGAVNNEVVIADGNGVTEGQEDHCLKNETVNNVVANADEGNSGAVECFQTYKRRKHAKSSSEFKVQENSRKHMGAASQLLAVRKPFDLAVGNTSKDHSHDHWGNVVLKHLYHSLGNDNGGMKWCIREALMSCPKISCAPTMKETLKIVKDGQECSPQLESLFYRLQSEANGHENVVHNGFSSESNGRDTTEGCQRVFRDILASEKFSSLCKVLLENFQGTKPETVFDFSLINSRMKGQAYEQSPTLFLSDVQQVWRKLQSTGNQIVAMARSLSNMSKASFCEQVGISAQSSFEDEKEVLCNQESISHMKPEQTVECVAFRLGTCWHCGDKADGTDCLVCDSCEEMYHLSCIEPAVKEIPYKSWFCANCTANGIGCRHKNCVVCERLNALKTLDDIVGEENIPTNEETLNELEENSNCTYDGIQISTDRRNSSDCKICKMAVDGEKVKICGHSFCPSKYYHVSCLSSKQLKSYGHCWYCPSCICQVCLTDKDDNKIVLCDACDHAYHVYCMKPPQNSIPKGKWFCIKCEAGIQAIRQARKAYESNKGKVGQNDSKPNEDIDKKWNKKRGRELDNVGGMMDMLITAANTLNSEEDLNAMLIDSKKALT

SEQ ID NO: 32347 - protein, 158 aa, Glycine max
  Clone ID: TF_GmC180828_2.pep
YAMYKRFQAEELLGYGSISDSLTIKFLLGTSGSIQIQGRCPAKHGLSRFRMERGTEVWKVDCICGAKDDDGEKMLACDTCGVWQHTRCAGIDNNTDGMPSKFVCMRCVNSYREETKKLPTPGEEANETCKFTTSCRDEAVARECATVSCNIAVNFGVR

SEQ ID NO: 32348 - protein, 248 aa, Glycine max
  Clone ID: TF_GmC7106_1.pep
MDSGGHYNPRTVEEVFRDFKGRRAGMIKALTTDVEEFYQQCDPEKENLCLYGFPTEQWEVNLPAEEVPPELPEPALGINFARDGMQEKDWLSLVAVHSDAWLQSVAFYFGARFGFDKADRKRLFTMINDLPTIFEVVTGSAKKQTKEKSSENNGNKSKSSSKGRGSEPPKYSKQVKDEEEGLDEEDDDEHGETLCGACGENYASDEFWICCDICEKWFHGKCVKITPARAEHIKHYKCPSCSNKRPRP

SEQ ID NO: 32349 - protein, 217 aa, Glycine max
  Clone ID: TF_LIB4164-036-R1-K1-G5.pep
HASGDVDGNGDECRLCGMDGTLLCCDGCPAVYHSRCIGVMKMHIPEGAWYCPECKINLIGPTIARGTSLKGAEVFGKDLYGQVFMGTCDHLLVLNVKSDDFCLKYYNQNDIPRVLQVLYASEQHRPVYNGICMAMLEYWNISENFLPLCVSKLPPMIEEEHKAVSSVKADYSLTFGNGICDNLVPSLDASLVTTRNPAPGSSGNARTTVNLELHEGN

SEQ ID NO: 32350 - protein, 211 aa, Glycine max
  Clone ID: TF_uC-gmflLIB3275P110a05b1.pep
MAPATTNSSPSAQRHVGFSRRTQAPRQLDGDSPPVKKYRMLSEIMARAPYAVVERETYSDLLCDQCGSGELPEELLLCDKCDKGFHMKCVRPIVVRIPIGSWLCPNCQGGKRVRPFSQKKIIDFFGIRRSSDDANDKRSSQDAKKRKKCSRPLVLHKKKRRLLPFVPTKDLNRRLKQMGSLASALTALNMGISDHLTYLPGMAPRCANQAL

SEQ ID NO: 32351 - protein, 869 aa, Glycine max
  unsure (1)..(869): unsure at all Xaa locations
  Clone ID: TF_GmC1724_1.pep
MDLVPSVKEKLNYFRIKELKDVLTQLHLSKQGKKQDLVDRILSVLSDEQVSKMWAKKNAGGKEQVAKLVDDTYRKMQISGATDLASKGQGASDSSSVKVKSEFDDAFQRDVKIRCLCGSRLETEDLVKCDDPRCHVWQHTRYEIITEKPAKDISDVPDTFXLSSLKYVQYGPACSFPLNNLCSIGRTLXSSKSSVVLTPDFRFRKIVEXVVRHLWSSMKWQLIHNDNGSEASHGGTELQITLCQNACTHPLWQRCCGRNDSLCLISKLSFQKLSIISAKSYYLXVNCLGVRIVKRRSMQQILNSIPKESDGVSNEEALARVCRCVGGGNAADDADSDSDLEVVSDTFTINLRCPMSGSRMKIAGRFKPCIHMGCFDLEVFVEMNQRSRKWQCPICLKNYALENIIIDPYFNRITSMMMNCGEEIAEIEVKPDGSWRVKVKSESERLELGNLAQWRLPDGTLCVSTAGDVKRVDTLKQVKQEGVSDSPAGLKLGIKKNCNGVWEVSKPEGTNTSSGNNLKRVFGNPEQVVIPMSSSATGSGRDGDDPSVNQGGGGHIDYSTTNGIEMDSLCLNNVDLAYEYTAPNTSAQVGGAEVIVLSDSEEDNDLLASPAIAYKNNRNDATDGYSVPPPVIVDSYTEDHNLGGNSCLGLFPNDDEFGMSSLWPLPSGSQAGPGFQLFGSDADVSDALVHLQHGPMNCSSSLNGYALAPNTALGSGSILQESSAGRSDADLNGGLVDNPLAFGGDDPSLQIFLPTRPADSSMHNELRDQASVANGVCTEEDWISLSLGGGAGGNNGDAPTQNGLNSRHQIPTREGAKNTLDDTASLLLGMNDVRSDRARRQRSDSPFSFPRQKRSVRPRLYLSIDSDSE

SEQ ID NO: 32352 - protein, 168 aa, Glycine max
  Clone ID: TF_LIB4164-031-R1-K1-A11.pep
PRVRYCKPCAKLIKSKQYCGICKKIWHHSDGGNWVCCDGCNVWVHAECDKISSKHFKDLENTDYYCPDCKGKFNCESSTSQTYKSKNISLETGPKPALPENLGVVCNGMKGIYIPNDHMIMCKCCLCGSRTHTLTDWERHAGSKARKWRYSVKVESTMQPLKEWIDEH

SEQ ID NO: 32353 - protein, 299 aa, Glycine max
  Clone ID: TF_GmC38836_2.pep
CQLVEKALSCKSCLREIVILASANVDEDISIVSEKLATAVKASKVAIVYDQHDTCDLELTLAKNFWKIQVSRLLNGVPKPTIQQIQKHLKEGQAMDISPEDHYMLKLTNVNCLGLQWAELAKKVATDSWALSLDKVFELVVESENLPVDMNEELRTLRARCMLYCICRKPFDPERMIACYHCNEWYHFDCMKLPCTEDVYICPACNPCTEGLPSNHDRLTSGKFEEPKTPSPRHSNPRKKQKRDVPSLTCNIFASRNQDKLRYSSGIECLRWQNRKPFRRAAKKRVELRSLSPFLCIQR

SEQ ID NO: 32354 - protein, 268 aa, Glycine max
  Clone ID: TF_GmC1740_1.pep
MAIARTGVYVDDYLEYASTLPAELQRLLNTVRELDDRSQSMITQTRQQTKYTMGFSSHGSKKGNHSYNNNYGNEDDDAAIEKMRKEIEVNQDSALSLCTEKVLLARQAYDLIDSHIKRLDEDLNNFAEDLKQEGKIAPDEPAILPPLPIVPKPEKRKPIYVTPQSKRIDYRDRDWDRERDRDFELMPPPGSHKKEYATPMDVDQPIDPNEPTYCVCHQVSFGDMIACDNENCQGGEWFHYSCVGLTQETRFKGKWYCPTCILLPQCQR

SEQ ID NO: 32355 - protein, 139 aa, Glycine max
  unsure (1)..(139): unsure at all Xaa locations
  Clone ID: TF_GmC1740_2.pep
LKQEGKIAPDEPAILPPXPIVPKAEKRKPIYXTPQSKRIDYRERDWDRERDRDFELMPPPGSHKKEYATPMDVDQPIDPNEPTYCVCHQVSFGDMIACDNENCQGGEWFHYSCVGLTQETRFKGKWYCPTCILLPQCQR

SEQ ID NO: 32356 - protein, 179 aa, Glycine max
  Clone ID: TF_GmC180828_1.pep
LPLNATVLDLRSEATSAFQEVYAMYKRFQAEELLGYGSISDSLTIRFLLGTSGSIQIQGKCPAKHGLSRFRMERGTEVWKVDCTCGAKDDDGEKMLACDTCGVWQHTRCAGIDNNTDGMPSKFVCMGCVNLYREETKKLPAPGEEANETCKFNTSCRNEAVARDCATVSCNIAVNFGVG

SEQ ID NO: 32357 - protein, 120 aa, Glycine max
  unsure (1)..(120): unsure at all Xaa locations
  Clone ID: TF_LIB4280-014-R1-N1-B5.pep
MPGMTGYXFLQRIKGSFSFKETPVGIMSFENVFPRINKCLEEGAKDFIVKPVKFFYVKRFKDFMPTKEVRGEFSPKKREGVPKRKLLGPFDGLPLLPPSIFLSPLPFLLRSGIGFPIRRV

SEQ ID NO: 32358 - protein, 135 aa, Glycine max
  unsure (1)..(135): unsure at all Xaa locations
  Clone ID: TF_LIB4164-020-Q1-K1-C11.pep
HASDGIDLVLTEVAMPILSGIGLLCKIMSHKTLKNIPVIMMSSHDSMGIVFKCLSKGAVDFLVKPIRRNELKNLWQHVWRRCHSSSGSGSESATHTRKFAKSKKXDACENNSDSSDENDYGSRNLSVRDGKWHSV

SEQ ID NO: 32359 - protein, 99 aa, Glycine max
  Clone ID: TF_GmC429772_1.pep
HEVIDLQESKSLKDIPVVIMSSENVPARINRCLEEGADEFFLKPVQQSDVNKLRPHLMKSKVKDGEDQQISNKRKETEESHSPDKTRTKMEPQKVVNFS

SEQ ID NO: 32360 - protein, 106 aa, Glycine max
  Clone ID: TF_LIB4165-030-Q1-K1-D7.pep
MAITGEIFRQSIKEMLEESPSGAPELQVLAVDDSLVDRKVIERLLRISSCKVTVVESGTRALQYLGLDGGNSSLGFDSVKVNLIMTDYSMPGMTGYELLKKIKESS

SEQ ID NO: 32361 - protein, 85 aa, Glycine max
  unsure (1)..(85): unsure at all Xaa locations
  Clone ID: TF_LIB3242-109-Q1-J1-E12.pep
RLLGGVVLNSGKAVSDQFRGGFRVLGGDDDPPGLRIFEKMLRPSLYEVPKCXRAKTALSLLRENKNGFDIVISDVHMPDMDGLNF

SEQ ID NO: 32362 - protein, 144 aa, Glycine max
  Clone ID: TF_GmC161_2.pep
GPEFPGLTHGPIITDYCMPGMTGYELLKKIKESSSFKETPVVIMSSENVLPRIDRCLEEGAEDFIVKPVKLSDVKRLKDFMTTKEVIRGELSQEEREGINKRKLLDTSDVSPSSPPSISSSPLPSSPSSVIDSPIRRLKMTGTD

SEQ ID NO: 32363 - protein, 408 aa, Glycine max
  Clone ID: TF_GmC1062_1.pep
LVMEKLLEKLRCRTLTVTNGSEAIRYAMGEVKFDVIMMEFRLPQVNGADVARMIRDTKNANTHTPIVAVTGYLKELQAPHYFDALIEKPPTVAKLTDTLSRLCQWKAPPPGWTPNQVYPSMMPSGLRQESSRQEDSPTTSNSSGYPPVPSASYRGSSREDSISSSFFGDNDSRAGEDMSVRVHNADDWRERDIARAMSGLGISDDAANADHKGAIPNRIGAPDLPHGESAPAVLEEATIRRQRSAEQVGAKRRILETRKHESAESGDDEDDELGHAPVRTRSPKTRPKSTSKLGIEMMRTNSRGSVISVEDVGQADSALPSSPPPMITEDPAAEEHESNLDAPTVAPVLLTPPVMFPEEPGDDVADFVIETPKSHKDATSPDPDPTPKAKSARTPDSEPTGLDSATDT

SEQ ID NO: 32364 - protein, 149 aa, Glycine max
  Clone ID: TF_GmC942_3.pep
MVCTANDLQEWKDFPKGLRVLLLEGDSSSAAEIREQLEAVDYNVSTFYDENEALSALSSSPEGFHVAIVEVSTSCSLGGFKFLENSKDLPTIMTSKDQCLNTMMKCIALGAVEFLSKPLSEDKLKNIWQHVVHKAFNAGANVLSESLKP

SEQ ID NO: 32365 - protein, 75 aa, Glycine max
  Clone ID: TF_jC-gmro02910075c01d1.pep
MDCQMPKMDGYEATKAIRKSEVGTSRHIPIVALTAHAMSCDEAKCLEVGMDAYLTKPIDFKMMVSTILSLTKRTS

SEQ ID NO: 32366 - protein, 92 aa, Glycine max
  Clone ID: TF_GmC103_3.pep
ECLNVIGPAGSSFQVILLDLHMPELDGFEVATRIPKFRSRNWPVIVALTASTDDLWERCMQIGMNGVIRKPVLLHGIASELRRIILQGNSVM

SEQ ID NO: 32367 - protein, 108 aa, Glycine max
  Clone ID: TF_GmC1391_1.pep
INLIITDYCMPGMTGYDLLRKIKESKSLKNIPVVIMSSENVPSRINRCLEEGAEEFFLKPVQQADVNKLKPHLMKSRAKEEQDQPFNNKRKDMEEIHSPNKTRIKCSS

SEQ ID NO: 32368 - protein, 136 aa, Glycine max
  Clone ID: TF_LIB5118-045-A1-PF1-E9.pep
HTLQQRSRQDGQRRITLADALRSARLDGRGVKLGPVAVGEHEDGSAGALEQPVQVVEARRIGRLETEHDGVEQRLTQVGPCVRERRHVQSFERNPRELPQTLDDAIGFAALFGDDENADHSKGGAPLRCCASDSSP

SEQ ID NO: 32369 - protein, 168 aa, Glycine max
  Clone ID: TF_GmC48369_1.pep
MVFSANDLQEWKDFPKGLKVLLLERDNISAAEIRAKLEAMDYNVSTFCEENEALSAISSGLESFHIAIVEVSSSSGQGGFKFLENAKDLPTIMTSNNHCLNTMMKCIALGAVEFLRKPLSEDKLRNIWQHVVHKAFNARASILSESLKPVKESVVSMLQLQTDDEQHE

SEQ ID NO: 32370 - protein, 90 aa, Glycine max
  Clone ID: TF_GmC413_2.pep
LLGSDGCSWIWVLAVTVVESGSRALQYLGLDGEKSSIGLDSVKVNLIMTDYSMPGMTGYELLKKIKESSVFREVPVVVMSSENILTRIDR

SEQ ID NO: 32371 - protein, 173 aa, Glycine max
  unsure (1)..(173): unsure at all Xaa locations
  Clone ID: TF_GmC1752_5.pep
QNQSLTTRNPAGSGLGLAICRRFVNLMEGHIWVESEGLXRTVTKGLLMHLGCDVTTASSSEECLRVVSLEHEVVFMDVCAGLDGYELAXRIHEKFTKHQDRPLIVALTGNTKKVTKENCMRVGMDALILKPVSVDKMRGVLSELLERRVLFQSVYPVRLLYIAISNLEKSPNL

SEQ ID NO: 32372 - protein, 191 aa, Glycine max
  unsure (1)..(191): unsure at all Xaa locations
  Clone ID: TF_jC-gmfl02220070e12a1.pep
GSSSSRIGSRKDSGSGINPLDIPKIFTKFAQNQSLTTRNPAGSGLGLAICRRVVNLMEGHIWVESEGIDKGCTVTFIVKLGIPDRSNEFKLPFVPKVPGNHGSTNFAGLKVLVTDDNGVSRTVTKGLLMHLGCDVTTASSSEECLRVVSLEHEVVFMDVCAGLDGYELAXRIHEKLLNIKIXPLIVALTGN

SEQ ID NO: 32373 - protein, 116 aa, Glycine max
  unsure (1)..(116): unsure at all Xaa locations
  Clone ID: TF_GmC3451_2.pep
RRRRRENSNAELVQWERFLPRMVLRVLLVEADHSTRQIIAALLRKCSYTVIAVPDGLKAWETLKKKASELDLILTEVELPAISGXALLSLIMEHDICKSIPVIMMASHGSVYMAFE

SEQ ID NO: 32374 - protein, 102 aa, Glycine max
  Clone ID: TF_14999708.pep
MELVNSQKLKQHEQQQHFHVLVVDDSVIDRKLLERLLRDSSCKATFVDSGDKALKFLGLLDDDLDNSSSTSSESLQLNGIKVNMIMTDYCMPGMSGYDLLKR

SEQ ID NO: 32375 - protein, 173 aa, Glycine max
  Clone ID: TF_GmC597_3.pep
MQTTQGEQSNNASAVHWERFLPRMVLRVLLVEADDSTRQIIAALLRKCGYKVMSSHDSVSMVFKCMLKGAADFLIKPVRKNELRNLWQHVWRRHAISRPPQNLTLPEIELGFAAENHAASNDSSGSVASTPKDDECSEKTEAHDILQLKSSSNLSNIDTVKHENSTKCERESD

SEQ ID NO: 32376 - protein, 82 aa, Glycine max
  unsure (1)..(82): unsure at all Xaa locations
  Clone ID: TF_LIB3087-003-Q1-K1-B2.pep
MNLSNGKGSTFSSPLKAGDSVSDQFPAGLRVLVVDDDSTRLMILERMLRACVYXVTQCQLAEVALSLXRENNNGFDIVLSDV

SEQ ID NO: 32377 - protein, 222 aa, Glycine max
  Clone ID: TF_GmC161_1.pep
MDSNSVVSWPRMPENINGFGLKQNQSEEVHVLAVDDSTVDRKVIEHLLKVLACKVTAVDSGLRALQLLGLLDEQKIPSETNGFVGLKVDLIITDYCMPGMTGYELLKRIKESSTFKETPVVIMSSENVLPRIDRCLEEGAEDFIVKPVKLSDVKRLKDYMTTKEVRGELSQEEREGINKRKLLDTSDVSPSSPPSISSSPLPSSLSSVIDSPIRRLKMTNTD

SEQ ID NO: 32378 - protein, 611 aa, Glycine max
  Clone ID: TF_GmC1876_1.pep
EFRVGPSLPVAMKKGVDIVLDPCNGSVLRYSRTKGHRGKLKQVLCNLLSNAVKFTEEGHIAVRAWAQKPSLQSSMIATHQYGSSRLLSRLCCRQNEARDDVEDLNIQQDPNCMDFTIEVDDTGKGIPKEKHKSVFENYVQVKETTLGQEGTGLGLGIVQSLVRLMHGDIEIMDKDIGEKGTCFRFNVLLTAHETQMNDDTRDDQVGSGNKNQSHGLTMSPKLSIWTRSPRSEASRVVLLIQNEERRGTTQRFMERLGIKVKVVKEWRQLHYTLKKIIKQKGLHPNSSSSPESSDSPSASSCTNGVPLSAQDGTNYISSIFKRTDIEASSGFVLIVIDANAGPFSELCKVVAEFKRGLCYPCRVVWLENPLIPSVDNKILNKDVSNSNDIVLSKPLHGHRLFQVIRILPEYGGVWPCNSSETKKEKGQVSLTNEGAIRRVELQECGSSSVTQQSYDRSRARKSHIHQGEIQECEESSNEKPLWGMKCLVVEDIVLLRRITKSTLDRLGASVMECENGEQAVQTVEEGLTRNSSNRPCDFILMDCQMPVMDGYEATRRIREIEKSHGVHIPIFALTANTGKEAILSIEAGMDDHLIKPINKEALLKAIKRIYT

SEQ ID NO: 32379 - protein, 739 aa, Glycine max
  unsure (1)..(739): unsure at all Xaa locations
  Clone ID: TF_GmC1752_1.pep
MESCNCIDPQVPADDLLMKYQYISDFFIALAYFSIPLELIYFVKKSAVFPYRWVLVQFGAFIVLCGATHLINLWTFRIHSRTVAVVMTTAKVLTAVVSCATALMLVHIIPDLLSVKTRELFLKNKAAELDREMGLIRTQEETGRHVRMLTHEIRSTLDRHTILKTTLVEXGRTLALEECALWMPTRTGLELQLSYTLRQQNPVGYTVPIHLPVINQVFSSNRAVKISPNCPVARLRPYAGKYMPGAVVAVRVPLLHLSNFQIYDWPEVSTRSYALMVLMLPSDSARQWHVHELELVEVVADQVAVALSHAAILEESMRARDQLIEQNVALDLARREAETAIRARNDFLAVMNHEMRTPMHAVIALSSLLQETDLTAEQRLMVETILKSSNLLATLINDVLDLSRLEDGSLQLEAATFNLHSLFREVLNLIKPVASVKKLSLTSHVASDLPMYAIGDEKRLMQTILNVVGNAVKFSKEGCISITAFVAKPESFRDARIPDFLPVPSDNHFYLRVQVKDSGSGINPQDIPKLFTKFAQNQSLTRNPAGSGLGLAICRRFVNLMEGHIWVESEGIGKGCTVTFIVKLGIPDRSNEFKLPFVPKVPGNHGSTNFAGLKVLVMDDNGVSRTVTKGLLMHLGCDVTTASSSEECLRVVSLEHEVVFMDVCTGLDGYELAVRIHEKFTKHQDRPLIVALTGNTKKVTKENCMRVGMDGLILKPVSVDKMRGVLSELLERRVLFESV

SEQ ID NO: 32380 - protein, 146 aa, Glycine max
  Clone ID: TF_GmC123982_1.pep
MAAGSSSNWVMESGDVPHVLAVDDNLIDRKLVEKLLRNSSCKVTTAENGPRALELLGLTSGGQNTMNGRSKVNMVITDYCMPGMTGYELLKKIKESSVTKEVPVVIMSSENIPTRINKCLEEGAQMFILKPLKQSDVKKLTCQLMN

SEQ ID NO: 32381 - protein, 119 aa, Glycine max
  Clone ID: TF_GmC191_3.pep
MGMAAESQFHVLAVDDSLIDRKLIERLLRTSSYEVTTVDSGSKALEFLGLCENDESNPSTPYVCPNNHQEVEVNLVITDYCMPGMTGYDLLKKIKESSSLRNIPVVIMSSENVPSRINR

SEQ ID NO: 32382 - protein, 132 aa, Glycine max
  Clone ID: TF_GmC690067_1.pep
MAHQNLGTKLTALVVDDNKINRKIHQKLLESVGMKNQGVENGQEAVDIHCHGQRLDLILMDMDMPIMNGIEATKELRSMGIGSMIVGVSSRCTEAEIRKFMEAGLNDYHEKPLNNSKLSSLLDKINPSFTRN

SEQ ID NO: 32383 - protein, 239 aa, Glycine max
  unsure (1)..(239): unsure at all Xaa locations
  Clone ID: TF_GmC1886_1.pep
MYTTPHPPIVYRFWLRDDWSGGHFQYMKHNGRTLKMPKMILLATNISSAEFDKAKATGSTDTVIKKPRRASMVAACLQQVLGMGKKRQLGKDMPNGFLHSLLYGKKILVVDDNGVNRRVAAGALKKFGADVKCAESGKVSXMLQLPHNFDACFMDIQMPEMDGFEATSRIRMMESKANEEMNGSEWHVPILAMTADVILATYDKCVKCGMDGYVSKPFEEENLYQEVAKFFKSKTISDS

SEQ ID NO: 32384 - protein, 114 aa, Glycine max
  unsure (1)..(114): unsure at all Xaa locations
  Clone ID: TF_GmC73999_1.pep
MGVGDRFPVGMRVLAVDDDETCLSVLENLLRKCQYNVTTTNQAIXALEMLRKNRNKFDLXISDVNMPDMDGFKLLELVGLEMDLPVIMLSXYRDKRAGDERCIXGACDYLTNQE

SEQ ID NO: 32385 - protein, 618 aa, Glycine max
  Clone ID: TF_GmC360_1.pep
AVVAVPDGLKAWELLKGRPHNVDLILTEVDLPSISGYALLTLIMEHEICKNIPVIMMSSQDSISTVYKCMLRGAADYLVKPIRKNELRNLWQHVWRRQSSTTGINGLQDESVAQQKVEATAENNAASNRSSGDAACIQRNIELIEKGSDAQSSCTKPDCEAESDPVGNMQEFSLLKCGEAYPSGTETQQVETSFRLGQTLMMHDCHAGGLNVSIRKNGEASTTNDKDTDTEHFGNASISGEAHDNPYVQINSSKEAMDLIGAFHTHPNCSLKNSTVNCTGNFDHSPQLDLSLRRSCPGSFENKLTEERHTLMHSNASAFKRYTTRQLQISMPAVLINFSDQQREQITNCEKNISHIATGSNSDSSTPMQRCIVSPTTVQSKESELATSHPPQGHSLPIPVKGVRFNDLCTAYGSVLPSVFHTQSGPPAMPSPNSVVLLEPNFQVNAFYQSNMKESSSEQLYESRGPNGNTTQNHIVYTQEHKSEHAEDRGHISPTTDQSVSSSFCNGNASHLNSIGYGSNCGSSSNVDQVNTVWAASEGKHKDLTNNANSHRSIQREAALNKFRLKRKERCYEKKVRYESRKKLAEQRPRVKGQFVRQVHPDPLVAEKDGKEYDHSDF

SEQ ID NO: 32386 - protein, 227 aa, Glycine max
  Clone ID: TF_GM342L02.C273.o1.fg.pep
YHNYWELETLREEDDLVIAESLANELSKWNYEVHVVDNFEKIMEDFRRVEPQLVLLDINLPTLNGFHWCQEMRKVSHVPIMFISSRTDNMDQILAIQMGGDDFIEKPFNLSLTVAKIQALLRRTYDLSIARDEIAVKGCKLIVDEAKLSKDNEHVQLSLTELQILKLLFQNENKYVSRTALIEKCWESENFIDDNTLAVNMTRLRKKLLSIGVDDLIETKKNVGYRV

SEQ ID NO: 32387 - protein, 979 aa, Glycine max
  Clone ID: TF_GM459L07rgnA2.C1.o8.ma.pep
MGGGGGGGSKMWHKKWWEKISGQGCKIHQQYYQYIGSKKVKRALWRKLLLTWVVGWFIVSLRIFCYMSSQGTEKRKETLASMCDERARMLQDQFNVSMNHIQAMSILISTFHHAKSPSAIDQKTFAKYTERTAFERPLTSGVAYAVRVLHSEREQFEKQQGWTIKRMDTLEQNPVHKDDYAPEALEPSPVQEEYAPVIFAQDTIAHVISVNVLSGKEDRENVLRARESGKGVLTAPFRLLKTNRLGVILTFAVYKRDLPSNTTPNERIQATDGYLGGVFDVESLVEKLLQQLASKQTVIVHVYDTTNRTHPIAMYGSNESGDFFYHVSTLNFGDPFRKHEMHCRFKQKPPWPWVAITTSIGILVIALLVGYIFHATVNRIAKVEDDYREMMELKKRAEAADVAKSQFLATVSHEIRTPMNGVLGMLHMLMDTDLDVTQQEYVRTAQESGKALVSLINEVLDQAKIEFGKLELEAVLFDIRAILDDVLSLFSEKSQGKRVELAVYVSDHVPELLIGDPGRFRQIITNLMGNSIKFTDKGHIFVTIHLVEEVVRSIEVDKESNSENTLSGSPVADSRRSWEGFKAFSQEGPLGSFSSPSNDLVNLIVSVEDTGEGIPLESQPLIFTPFMQVGSSISRKHGGTGIGLSISKCLVGLMNGEIGFVSIPKIGSTFTFTAVFTNGHRSSSECKIQQINNQPQSASSEFEGMTALIIDPRSVRAEVSGYHIQRLGIHVEMVSDLKQGLSTISNGNVVVNMVLIEQEVWDRDLGLSSHFVNNTRRIDHGVPPKLFILVNSSSSFKASVNLGVHNPTVITKPLRASMLAASLQRAMGVQNKGAPHRELQSLSLRHLLRGRKILIVDDNGVNRAVAAGALKKYGADVVCVSSGKDAISSLKPPHQFDACFMDIQMPEMDGEMEDSVNREVSMDDFENITNWHVPILAMTADVIQATHEECLRCGMDGYVSKPFEAEQLYREVSRFFQSS

SEQ ID NO: 32388 - protein, 228 aa, Glycine max
  Clone ID: TF_jC-gmXLIB3563P009ca05a1.pep
MTALIIDPRSVRAKVSRYHIQRLGIHVEMVSDLKQGLSTISNGNIIINMVLIEQEVWDRDLGLSSHFVNNTRRIDQGVPPKLFILVNSSSSFKASVNLGVHNPIVITKPLRASMLAASLQRAMGVQSLSLRHLLRGRKILIVDDNSVNRAVAAGALKKYGADVVCVSSGKDAISSLKPPHQFDACFMDIQMPEMDGFEATKRVMEMEDSVNRAVSMDDFENITNWHVP

SEQ ID NO: 32389 - protein, 246 aa, Glycine max
  Clone ID: TF_GmC103_1.pep
MSQEGCLLIFLICSSQGPLSANDQYTIYIPGTVKVLVSMLPIFFFSPLILCFACLLCYCQLMQGNIWLVPNAQGFPQVMALFLRFQLRRSIAVSISEPGENSEPSNSNSFFRGLPGCFGLQVLLVENDDVNRAVTQRLLQKLGCVVTPVASGFECLTVIGPAGCSIQVILLDLHMPDLDGFEVATRIRKFRSGNQPMIVALTASAEEDLWERCMQVGINGVIRKPVLLHGIASELRRILMQGNNVL

SEQ ID NO: 32390 - protein, 746 aa, Glycine max
  Clone ID: TF_GmC433_1.pep
VLIADSKELKELNQRLRDGKKIAGGEHGLCEEVKCNGIAEEVKVEQGGTVESSSVQQHIPQPQGAIICWERFLHIRSLKVLLVEIDDSTRHVVTALLRNCSYEVIEAANGLQAWKILEDLTNHIDLVLTEVAMPGLSGIGLLYKIMGHKTRKNIPVVMMSSHDSMGLVFKCLSKGAVDFLVKPIRKNELKNLWQHVWRRCHSSSGSGSESGTQTQKSIKSKSLEKSDNNSGSNDEDDNESIGLNNVDGSDNGSGTQSSWTKRAVEVDSHKPVSQWDQIAECPDSTCAQVVHSNAEMGGNKVVPLAAKDCAEQNEQLVKTAGSQHSNAPDVGPSKFSEQINRGQLDLNCENQSSKLRCKGLSLSDAITSTCDSQMHSGEFEALNKKPKSSDIENKGTNNDEELPSLELSLKRLRGVEDADITIQDDRNVLRRSDQSAFSRYNAASNTKKSPTGCVGSNSPYNNSLEVTKKDSSRDIQSHSCGNPPNQNSNGASNNIDMGSTTNNAYAKSAVMSEPAGASTTKCLYQTSAFQPVKNSLVCTSQQVVLNNTEDMSATILAPPKLDRHKDSAALDFHLHCENHNCIADNMKHQLPPDHDAESIKKMATAAPHCGSSNVEEVLVEGNVGNHSINRSVSGSNNGSNGQNGSSTAVNAGGTNTESNNGLTGNSGSGDASGSGSANRVDQNKTSQREVALTKFRQKRKERRERCFHKKVRYQSRKRLAEQRPRFRGQFVRQTSNENASEATTDS

SEQ ID NO: 32391 - protein, 95 aa, Glycine max
  Clone ID: TF_GmC1886_2.pep
MLAWTWGNHLNRGYTFCRFEATSRIRMMESKANEEMNNGNEWHVPILAMTADVIHATYDKCMKCGMDGYVSKPFEEENLYQEVAKFFKSKTMSDS

SEQ ID NO: 32392 - protein, 120 aa, Glycine max
  unsure (1)..(120): unsure at all Xaa locations
  Clone ID: TF_LIB3109-012-Q1-K1-E5.pep
MLKYIARDKEFRRIPVIMMPAQDEVSIVVKCLRLGAADYLVKPLRTNELLNLWTHMWRRRRMLGLVEKNILNYDFDLVVSDPSDANTXSTTLFSDDTDDKSKRSTNPEAGISVQQEQEST

SEQ ID NO: 32393 - protein, 65 aa, Glycine max
  Clone ID: TF_LIB3242-581-P1-J1-C12.pep
KKYHIPILAMTADVIHATWDECVKCGMDGYVSKPFEEENLYQAVAKFFNPKPTSIQQNARTGKAT

SEQ ID NO: 32394 - protein, 350 aa, Glycine max
  unsure (1)..(350): unsure at all Xaa locations
  Clone ID: TF_GmC3283_9.pep
CRKFRFNNTDFEAHYPAKEELKSKLLNIRDMRNPGFVIVVDIGLLDLSTDIWKEQFNFLHRYFGRAKFVWMLNHDTSNTIKMELRRKGHILMVNKPLYKAKMIHILEAVINERNLELQKKNMIAPRTTMKEGDLHEFLEIDSTHFDGASSDDSDISEISGSNPVSANGDKPVEKLENSHPSSPHHMNNCLVRLTNENECLEEHNLRKEESSSPSSSSATEDNQPKSLSTKESSSISTEDQDEDSECGDTNRVTSSSKAVVDGKKSLEGLKILLAEDTPVLQRVATIMLEKMGADVVAVGDGQQAVDALNCMFTAEDCXENHSRRKETQDHLKQRFSTCRPYDLILMDCQV

SEQ ID NO: 32395 - protein, 235 aa, Glycine max
  Clone ID: TF_GmC46877_1.pep
MEFVDTRKLQLQHQQQLQQQPQHFHVLAVDDSVIDRKLLERLLRGSSCKVTCVDSGDKALKYLGLIDELDDTSSTSLESESSHPPPQPLQREGIKVNLIMTDYCMPGMSGYDLLKRVKGSSWKDVPVVIMSSENVPSRISMCLEEGAEEFLLKPLQLSDLDKLQPYFLKSVDNSCEKESANSSIDSDNDNVINNNSNNSNSNNNNNNSISKRKAMSPEPHREERSRPKMKELAVV

SEQ ID NO: 32396 - protein, 119 aa, Glycine max
  unsure (1)..(119): unsure at all Xaa locations
  Clone ID: TF_LIB3242-407-P1-J1-C7.pep
DDSTRHVVRALLRNCSYEVTAVSNGLQAWKXLEDPENGIDLVLTEVAMPILSGIGLLCKIMSHKTLKNIPVIMMSSHDSMGIVFKCLSKGAVDFLVKPIRRNELKNLWQHVWRRCHSKK

SEQ ID NO: 32397 - protein, 205 aa, Glycine max
  unsure (1)..(205): unsure at all Xaa locations
  Clone ID: TF_GmC413_1.pep
MASAGDLFRHGLPEVGGAGKLHVLAVDDSHVDRKVIERLLKISSCKVTVVESGSRALQYLGLDGDLANSIGLDSVKVNLIMTDXSMPGMTGYELLKKIKESSVFREVPVVVMSSENILTRIDSCLEEGAEEFLLKPVKLSDVKRVTDFIMRGEGMKGVKRSKKRSRSDDCIPSLSTAFSSVSHPCDLSSPPSPCVSQSKKSRLSI

SEQ ID NO: 32398 - protein, 575 aa, Glycine max
  Clone ID: TF_GmC3451_1.pep
MDELNGAMTTENSNAEVVRWERFLPRMVLRVLLVEADHSTRQIIAALLRKCSYTVIAVPDGLKAWETLKKKAPELDLILTEVELPAISGFALLSLIMEHDICKNIPVIMMSSHDSVSMALKCMLKGAVDFLIKPIRKNELRNLWQHVWRRHAISTPTQNTIFSPKKLKTASEDNSASNKSSGSVASSKKNNECSERLSEAQSTCTSPIFEAESTYVENMQDVPQPEQDCGVAEPETENEDEILKSELDGDNSHVSMMQGCSAERVKPSKGAIDLIATFDCETQLELSLRSDFPGSSGNQASEATEESQRLNHSNTSAFSWYSNSKLLQPHFSTPSITFPEVNNLSWDSHESHKLSGITSGNCQYGGSNQNLENMIGTVICQYGQVTPKLSNSQCGLLPVSGVISNLKSEGHGNVFTSLFYAQSGIHPMSSPKPVCQNESSPFPTNHARHDSPVADQSAGNSLCHDAANHVNSSAYGSMDSGNDGNATSAIVSKNAPDGFSDSGCHNYDGFRVTDPHRSSQREAVLVKFRLKRKERCFEKKVRYQSRKRLAEQRPRVKGQFVRQHDHPVAEAGGDS

SEQ ID NO: 32399 - protein, 164 aa, Glycine max
  Clone ID: TF_GmC6773_1.pep
MAITGDIFRQSITEMLAESPSGAPELHVLAVDDSLVDRKVIERLLKISSCKVTVVESGTRALQYLGLEGENGSLGFDSVKVNLIMTDYSMPGMTGYELLKKIKESSVFREIPVVIMSSENVLTRIDRCLEEGAEDFLLKPVKLSDVRRLKDFIMKGKVKEGENI

SEQ ID NO: 32400 - protein, 68 aa, Glycine max
  Clone ID: TF_GmC3283_34.pep
PTRPEATKAIRKSEVGTSRHIPIVALTAHAMSCDEAKCLEVGMDAYLTKPIDFKMMVSTILSLTKRTS

SEQ ID NO: 32401 - protein, 116 aa, Glycine max
  Clone ID: TF_LIB3242-550-P1-J1-E10.pep
VNNGVEAVRAVQRHTYDVILMDVYMPVMNGLQTTKLIRSYEETGNWEAAREAGIEQCSPASNECSVPLKNRIHIIAMTANTMSESADECYANGMDSFVSKPVTFQKLKDCLEQYLR

SEQ ID NO: 32402 - protein, 495 aa, Glycine max
  Clone ID: TF_GmC597_2.pep
VVAFCDGLKAWETLKNKPSDIDLILTEVDLPSISGFSLLTLIMEHDICKNIPVIMMSSHDSVSMVLKCMLKGAADFLIKPVRRNELRNLWQHVWRRHAISRPPQNFTLPEIEIGFAAENHAASNDSSGSVASTAKNGECSEKTSEAQDISQLKRSSNLSNIDTVKHENSTKYIHGCSDELVDPYTGAIDLIATFKNLPKSTDEKCSFSSGNTAKFDFDTQLELSLRRRDFPGSSCKAASEERQLLNHSNASAFSRYSSSKLLQPLFPTPSTISAKLTNSSLSSHESHKFSENASTSHQYGGKNQNQEKIITPVIGQSGQVDPKLPNSQLGYFPATGVTSDHKSTGNGNVFPSMLYAESGVHPIWTPKSVCQKESSPFPTITSSQSNPQSHNSECHLWSEDSTHASDKNLNDQINLDCETHDSPDASQSAGTNSHRTSHREAALTKFRLKRKDRCYEKKVRYQSRKRLAEQRPRVKGQFVRQVQDDHPVADVGGGS

SEQ ID NO: 32403 - protein, 159 aa, Glycine max
  Clone ID: TF_GmC353_2.pep
HASAHASASSQNEYVHIKFDFQITESSQSDKAISTIHYSSRRQYYNNEPKEGLSFSMCKKLVQMMQGNIWISPNSLGLVQGMTLLLKFQIGPSLGKSIFAPKDYSSSQFRGLKVLLAEDDGVNRTVTKKLLEKLGCQVIAVSSGFECLSAISGGWNSFR

SEQ ID NO: 32404 - protein, 128 aa, Glycine max
  Clone ID: TF_GmC62872_1.pep
GLTVRPADDDDVNRTVTKKLLEKLGCQVTAVSSGFECLGAISGSGNSFKIILLDLHMPEMDGFEVARRIRKFQSHNWPLIIAFTASAEEHIKERCLQVGMNGLIRKPILLREIADELGTVLQRAGEKL

SEQ ID NO: 32405 - protein, 148 aa, Glycine max
  Clone ID: TF_6667475.pep
HQGLIFTNGAQAVEVFTRERPQLVLMDALMPVMDGFEAARRIKQLAGEALVPIIFLTSLRESEALAQCLDAGGDDFLPKPYNPLILAAKINAMDRLRRLQATVLRQRDQIARHHDYLLHEQRAAKAVFDKVAHSGCINAAPNIRYLQS

SEQ ID NO: 32406 - protein, 445 aa, Glycine max
  Clone ID: TF_GmC11138_2.pep
MNNNVGKGKKGLAEQNHMFFNKKSLNNGVVNGGVGSGSSTEDDTRFNKVVEDGNNGLRGLIQIHGSLQISQQPPQEPAVCWERFLPLRSIKVLLVEDDDSTRHVVRALLQNCSYKVTAVSNGLQAWKVLEDPENGIDLVLTEVAMPILSGIGLLCKIMSHKTLKNIPVIMMSSHDSMGIVFKCLSKGAVDFLVKPIRRNELKNLWQHVWRRCHSSSGSGSESATLTRKFAKSRSNDAYENNSDSSDENDYGSRGLSIRDGSDNGSGTQSSWTKCLAQVGSPHPVSPHKQLVDAPDSTCAQVMQTKTEKVSSRWVHATEKECHELIDLDDVARVKDLAMGISLNMQLEHPLEELSSNPIVGKGANKMSDVDDMQIIKRKSNVCEKGQLEYNGDKTGTQENQAMNVIDVTDSNSPQAESRDLNTPNGFLVFHNQKQTVAPKSIHPLN

SEQ ID NO: 32407 - protein, 181 aa, Glycine max
  Clone ID: TF_GmC167244_1.pep
MDTDSFVSFDHVSPEDSHEVHVLAVDDSLVDRKVIERLLKISACKVTAVDSGIRALQFLGLDEQRRTSESDGFVPDLKVDLIITDYCMPEMTGYELLKKIKESTMFREIPVVIMSSENILPRIDRCLEEGAEDFIVKPVKLSDVKRLKGYMTPKEVIKMRSQEDRRSDGYVNGGDGGGCGR

SEQ ID NO: 32408 - protein, 219 aa, Glycine max
  Clone ID: TF_GmC31263_1.pep
MNLSHGKGSTSSSPLKAGDTVSDQFPAGLRVLVVDDDPTCLMILERMLRACLYEVTKCKRAEVALSLLRENKNGFDIVLSDVHMPDMDGFKLLEHIGLEMDLPVIMMSADDGKQVVMKGVTHGACDYLIKPVRIEALKNIWQHVVRMRKNGLRDVEQSGSMEEGDRPPKGSDDGNYSSSVNEAQSSKKRRDEDQEGDEKDDYSTLKKPELLVCWLINSY

SEQ ID NO: 32409 - protein, 99 aa, Glycine max
  Clone ID: TF_LIB3242-023-Q1-N1-C10.pep
IICCLLRERGPENKISVVKFGAFCSVIGVFSKQCIILHLGTWFWFNMGVEDRFPVGMRVLAVDDDETCLSVLENLLRKCQYNVTTTNQAIKALDMLRKN

SEQ ID NO: 32410 - protein, 328 aa, Glycine max
  unsure (1)..(328): unsure at all Xaa locations
  Clone ID: TF_GmC142127_1.pep
AITDMKKHNLEDLPSNFRGLKAIVVDGKPVRAAVTRYHLKRLGIQAKVANSINKAVSLCGKNGSLASGYXRLRLQIXQKDSWVCGEEEIFNLWQLDWKQNGHMFKIPQMILLATIQCVATGLETESAYXKIPQIILLATNIGNDEFDKAKAAGFNDTVIMKALRASVVAACLRLLRGTGILGLHGNVVNPRVAAGALRNFGADVTCAESGNAALEMLQLPHNFDACFMDIQMPEMDGFQATQRIRMMETKANEQQMNGEGNGWKDKYHIPILAMTADVIHATYDECVKYGMDGYVSKPFEEENLYQAVAKFFNPKPTTDNSLIENGRT

SEQ ID NO: 32411 - protein, 987 aa, Glycine max
  Clone ID: TF_GmC4331_1.pep
MGGGGGGGSKMWHKKWWEKISGQGCKIHQQYYQYIGSKKVKRALWRKLLLTWVVGWFIVSLRIFCYMSSQGTEKRKETLASMCDERARMLQDQFNVSMNHIQAMSILISTFHHAKSPSAIDQKTFAKYTERTAFERPLTSGVAYAVRVLHSEREQFEKQQGWTIKRMDTLEQNPVHKDDYAPEALEPSPVQEEYAPVIFAQDTIAHVISVNVLSGKEDRENVLRARESGKGVLTAPFRLLKTNRLGVILTFAVYKRDLPSNTTPNERIQATDGYLGGVFDVESLVEKLLQQLASKQTVIVHVYDTTNRTHPIAMYGSNESGDFFYHVSTLNFGDPFRKHEMHCRFKQKPPWPWVAITTSIGILVIALLVGYIFHATVNRIAKVEDDYREMMELKKRAGAADVAKSQFLATVSHEIRTPMNGVLGMLHMLMDTDLDVTQQEYVRTAQESGKALVSLINEVLDQAKIEFGKLELEAVLFDIRAILDDVLSLFSEKSQGKRVELAVYVSDHVPELLIGDPGRFRQIITNLMGNSIKFTDKGHIFVTIHLVEEVVRSIEVDKESNSENTLSGSPVADSRRSWEGFKAFSQEGPLGSFSSPSNDLVNLIVSVEDTGEGIPLESQPLIFTPFMQVGSSISRKHGGTGIGLSISKCLVGLMNGEIGFVSIPKIGSTFTFTAVFTNGHRSSSECKIQQINNQPQSASSEFEGMTALIIDPRSVRAEVSGYHIQRLGIHVEMVSDLKQGLSTISNGNVVVNMVLIEQEVWDRDLGLSSHFVNNTRRIDHGVPPKLFILVNSSSSFKASVNLGVHNPTVITKPLRASMLAASLQRAMGVQNKGAPHRELQSLSLRHLLRGRKILIVDDNGVNRAVAAGALKKYGADVVCVSSGKDAISSLKPPHQFDACFMDIQMPEMDGFEATKRIREMEDSVNREVSMDDFENITNWHVPILAMTADVIQATHEECLRCGMDGYVSKPFEAEQLYREVSRFFQSS

SEQ ID NO: 32412 - protein, 204 aa, Glycine max
  Clone ID: TF_GmC413_3.pep
MASAGDVFRQGLPEVCAAGKLHVLAVDDSHVDRKVIERLLKISSCKVTVVESGSRALQYLGLDGEKSSIGLDSVKVNLIMTDYSMPGMTGYELLKKIKESSVFREVPVVVMSSENILTRIDSCLEEGAEEFLLKPVKLSDVKRVTDFIMRGEGMKGVKISKKRSRSDDCIPSLSTAFSSVSHPCDISSPPSPCVLQPKKSRLSI

SEQ ID NO: 32413 - protein, 198 aa, Glycine max
  Clone ID: TF_GmC478_1.pep
ISREMIELQGGEIGVRSRPGKGATFAFYIAARTADAPPPSVQQSLSSPALMSGRRPSENTRARYSILVVEDNLVNQKILRMQLQKLGHEVHVVSHGREALDFLETTSCWEGGTASHTHVSIILMDIEMPVMNGLECTRRIREAESEGRVKRHLPIIAVSANAREGQVRYAMECGVDDAISKPFRVADLMPIIERLALV

SEQ ID NO: 32414 - protein, 503 aa, Glycine max
  unsure (1)..(503): unsure at all Xaa locations
  Clone ID: TF_GmC353_1.pep
HASAHAPSSGGSVELGAVAAIRMPLLHVSNFKGGTPELVETCYAILVLVLPSSSTRVWTYHEMEIVEVVADQVAVALSHASVLEESQLMRQKLEERNRALQQAKKNAMMASQARKSFQKVMSHGMRRPMHSVLGMLSLFQEDIVXTGQRIRGDTMLKVVNELSIFIDDVMEMSXNEKGGFRLEMKPYLLHSKVKEAASIAKCLCVYEGFGFEIDVQKSLPETVMGDEARTFQVILHMIGYLLNMNDKGTLNFRVFLESDGGDRDDKNIGIWRSSSQNEYVHIKFDFQITESSQSDKAISTIHYSSRRQYYNNEPKEGLSFSMCKKLVQMMQGNIWISPNSLGLVQGMTLLLKFQIGPSLGKSIFAPKDYSSSQFRGLKVLLAEDDGVNRTVTKKLLEKLGCQVIAVSSGFECLSAISGAGNSFRIILLDLHMPEMEGFEVAKRIRKFHSRSWPLIIALIASAEEHVREKCLLAGMNGLIQKPIVLHQIANELRTVLQRAGEKL

SEQ ID NO: 32415 - protein, 204 aa, Glycine max
  Clone ID: TF_GmC413_4.pep
MASAGDLFRHGLPEVGGAGKLHVLAVDDSHVDRKVIERLLKISSCKVTVVESGSRALQYLGLDGEKSSIGFDSVDVNLIMTDYSMPGMTGYELLKKIKESSVFREVPVVVMSSENILTRIDSCLEEGAEEFLLKPVKLSDVKRVTDFIMRGEGMKGVKRSKKRSRSDDCIPSLSTAFASVSHPCDLSSPPSPCVSQSKKSRLSI

SEQ ID NO: 32416 - protein, 249 aa, Glycine max
  unsure (1)..(249): unsure at all Xaa locations
  Clone ID: TF_GmC191_1.pep
MGMAAVESQFHVLAVDDRIIDRILIERLXQPFSIXVTTFDFVHYFLXFSGCHRMMRSISCIPSVLSQQPXTPQEVEVNFVITDYSMPGMTGYDLLMKIKESSSLRNIPVVIMSSENVPSRINRCLEEGAEEFFLKPVRLSDLNKLKPHMKKTKFKDQKQETVERFEDSEVQQQQSQQQIIIQNEHHQAPKLQVLQPESESESHPQPTIEQQQQILQQANNNNKRKTMEQGLSPETDRTRPRYSGIATVV

SEQ ID NO: 32417 - protein, 300 aa, Glycine max
  Clone ID: TF_2407791.pep
GGVGKTTLLIFRNRIGGNAKDRFAIFHLARTLSQFITINHGHIYNQVNTMSNSIRSARSSASRPLPANSTSQPRCDSCSFQIMRLMGFVFQPSVCVASIGAACGSTSVVSMTSCRRWHAIDCFLRSPATAVDMYPTAINSSDHHPTKIRAALATMRGRLHAIPALFPGWTPKYPTRMALPSSLMHRLVHILIGSASPTLPNQPHNFWQKKLPENPNCTYNFNFLKKPAHLGENCPLFESVTNKVKKKKKLAHPGLNGPILKCHPGLGQSASKSISPGLCHFSARHPARPDRTVQIYAPVF

SEQ ID NO: 32418 - protein, 348 aa, Glycine max
  Clone ID: TF_GmC57050_1.pep
MSLVDLMGGEIGFVSEPGIGSTFSFTGTFRKGESTSLDAMQQNNHFGSEFQGLRTLVVDSRKIRAEVTRYHLQRLGMSVDVTYSLNSACSCLSNVCNKSMSTQLAMILIDKDAWDKECHILYTIKKRRQNGIKGDPMNLPKIFLLATHLSSNEQDGLKSVGIIDDILMKPLWLSSLIQCYRVSLGTENKRVNREKVSKLGNLLIDKQILVVDDNAVNRRVAHRVLQKYGAKVTAVESGRAALKMLELPHNFDACFMDLQMPEMDRFEATRKIRCLESEVMEKIACGQASAEMFGNISYWHIPILAMTADSTQSSNEECIKCGMNDYVSKPFEEEQLYMAMARFFKSDS

SEQ ID NO: 32419 - protein, 157 aa, Glycine max
  unsure (1)..(157): unsure at all Xaa locations
  Clone ID: TF_GmC663_2.pep
MEKVAPPPILMHRKRDLSYDIVSAGPNESWRWEWDSVRFAGKPPPPPPLSPNNDVVFEAESVVPPLQLKLGGTTRVNNNNININVSNKRVRSGSPGTASYPMCQVDNCREDLSKAKDYHRRXKVCEAHSXASKALLANQMQRFCXQCSRFHPLSSSM

SEQ ID NO: 32420 - protein, 59 aa, Glycine max
  Clone ID: TF_LIB3093-052-Q1-K1-H5.pep
FPCLVHSLQSTRFCNADLSKSNDYHILHKVGDIHSKGIISLVLNSILTFFQQFNMFHLL

SEQ ID NO: 32421 - protein, 53 aa, Glycine max
  Clone ID: TF_14126564.pep
IRFHLLVEFDDGKRSCRRRLAGHNERRRKPQFDYMTGKQHKILQSYQGMKNAF

SEQ ID NO: 32422 - protein, 152 aa, Glycine max
  Clone ID: TF_LIB4391-031-Q1-K1-E6.pep
GYHRRHRVCLRCANAATVMLNGEAKRYCQQCGKFHVLSDFDEGKRSCRRKLERHNTRRRRKPTADSGGATHSELLQPVAENEENNYDVEAGKECSLADTDINDVGVSLDLEDEPAPIPSSAPEAQNINSDSVVSLAVSGETRVNSGNTSNSP

SEQ ID NO: 32423 - protein, 114 aa, Glycine max
  Clone ID: TF_GmC138175_1.pep
MDGSWSEGKRSMSYKEEDEYEEEEEEEVSEYGDDGKKKRVVSNKRGSKAGGSVPPSCQVDGCNADLSEAKPYHRRHKVCEYHAKAPAVVIGDQHQRFCQQCSKVHELSEYDDSR

SEQ ID NO: 32424 - protein, 785 aa, Glycine max
  unsure (1)..(785): unsure at all Xaa locations
  Clone ID: TF_GmC4383_1.pep
MEPLSLPPLPVMDDAEDPSSIWDFSYLLDFDLDDQDIIINNNNSLPLPFNDHPAPNEIPQNDRVRKRDPRLTCSNFLAGRVPCACPELDAILEDEGLPGKKRARTARASASARCQVPACEVDISELKGYHRRHRVCLRCANAATVMLNGEAKRYCQQCGKFHVLSDFDEGKRSCRMKLERHNTRGGRKPTTYSGGATHRQLLKRDIINSEEELPERYGRRCLGRGFLTSRPAIFVIVSDAVCLGVCVADLHPGRVSELAVSVRRCLFNYXYFLHLSSSWYIFDVTLNKSYCEDIIRLREDDRRGRISFKLYDWNPAEFPRRLRHQIFQWLASMPVELEGYIRPGCTILTIFIAMPNIMWINLLKDPLEYVHDIVAPGKMLSGRGTALVHLNDMIFRVMKDGTSVTNVKVNMHAPKLHYVHPTYFEAGKPMEFVACGSNLLQPKFRLLVSFSGKYLKCEYCVPSPHSWTEDNISCAFDNQLYKIYVPHTEESLFGPAFIEVENESGLSNFIPVLIGDKKICTEMKTLQQKLDVSLLSKQFRSASGGSICSSCETFALSHTSSSDLLVDIAWLLKDTTSENFDRVMTASQIQRYCHLLDFLICNDSTIILGKILPNLIILTESMKSNVVINRTSDVDIMQLLNHIHNARNAVYQKHPKSESIIVHSEMKGFILAQGCSQDNKLSVAINSQGIQSRADEKWGVLKVKSPTSNEKMERIPLLKRDIIMSMEELPERYGRRCLGRGFLTFRPAIFVLVSVAVCLGVCVAVLHPGRVSELAVSVRRCLFNY

SEQ ID NO: 32425 - protein, 229 aa, Glycine max
  unsure (1)..(229): unsure at all Xaa locations
  Clone ID: TF_GmC261392_1.pep
MDWDGKEFAWDPRGLELANGEGQKSEAASVDLRLGEEKTAPDVVAKDTKDSKTVSSPSGSSKRSRLQNGLQNMCCSVDGCNSDLSDCREYHRRHRVCEKHSKTPVVMVGGKQQRFCQQCSRYGSLGEYVGVKSFCMRLCDSQLFRXLDVFCDMGWCQLLLLCRFHSLGEFDEVKRSCRKRLDGHNRRRRKPQPPSLFMAAEKFMYNYKGRFASSWFFFCLLLLNWISIV

SEQ ID NO: 32426 - protein, 125 aa, Glycine max
  Clone ID: TF_GmC860438_1.pep
HICGVVNADLHEAKQYHRRHRVCEYHVKAQVVLVDEVRQRFCQQCSRFHELAEFDDTKRSCRSSLAGHNERRRKNSDQSQAEGSSRNKGTGHPQLKDITCGQADERGRIQITIHENAAYKHFQIR

SEQ ID NO: 32427 - protein, 181 aa, Glycine max
  Clone ID: TF_GmC735929_1.pep
VEGCHVALVNAKEYHRRHRVCDKHSKAPKAVVLGLEQRFCQQCSRFHVVSEFDDSKRSCRRRLAGHNERRRKSSHLSVTRNSRQGCALSLLSSGSSSENWLSHHADFSTRCSAALRELIAENRAALITRQQQLVYDRDWPHVVPHHDAAVEEEEEDFEDLQQQQQPPEPNYFPQQHMFPQT

SEQ ID NO: 32428 - protein, 440 aa, Glycine max
  unsure (1)..(440): unsure at all Xaa locations
  Clone ID: TF_GmC7371_1.pep
MGGKSSKGSGRRYDFGASSSSRDNSYGGYPPQSPYTSYQTPQHPCASASASAPFYDYAQPKRKLDKKYSRIADNYRSLDEVTAALANAGLESSNLIVGIDFTKSNEWTGKRSFNRKSLHDIRSGQNPYEQAISIIGKTLSAFDEDNLIPCFGFGDASTHDQDVFSFYSEERFCNGFEEVLTRYRQIIPSLKLAGPTSFAPIIEMAMTIVEQSGGQYHVLLIIADGQVTRSVDTQNGNLSPYQMDXQEQNTKDNSLDAISAXQSIVLVGVGXWEMMREFDDNIPSRAFDNFQFVNFTEIMTRNVDSTRKETDFALSALMEIPSQYKATLELGILGSRRGHSPDRVALPPPLYSRTSSSISTKSTRSNSFQQRTPTHTSYDSSVHTETSSSSLYDNKVCPICLTNAKDMAFGCGHQTCCECGEDLQFCPICRSTIHTRIRLY

SEQ ID NO: 32429 - protein, 175 aa, Glycine max
  Clone ID: TF_GmC263455_1.pep
GLTAVTVPRCQVEGCHLALLNAKDYHRRHKVCEMHSKAPKVVVLGMEQRFCQQCSRFHVVSEFDNSKRSCRRRLAGHNERRRKSSHDSVARNSSKGGCALSLLSSRSDSWLSPSDLSIRCSAALRELIAENRAAIMARQFVSDRDWHNHHHAVEDFKEIQPESNYFPQQMFPQTQ

SEQ ID NO: 32430 - protein, 808 aa, Glycine max
  Clone ID: TF_GmC365_1.pep
MTASTSSRAVCQVEDCRADLSNAKDYHRRHKVCDMHSKATQELVGNVMQRFCQQCSRFHVLQEFDEGKRSCRRRLAGHNKRRRKTLPDATVVNGGSLNEEKGSSYLLMSLLRILSNMHSNGSDNMRNQDVLSHLLRNLASLTGTINGRNIVSLLEGSQDLVKAGTSGAAQNVPNTNSDGPEPSRPLDSSIKMDDGLIHRDPPESMVQRETTPANDMAKKCIASGSDGVGSLKSPSVPQSSNVLLSRDGLPPQSVAAQTTVGRIGIMLRTRGILVLLCLQGMGLLIILNWLSHSPTEIESYIRPGCIILTIYLRLENSAWEELCYNLESSLRKLAAPNDSFWRTGWIYTRVQHSVAFLYNGQVVLDAPLRLKSPQSCQILCVKPLAVSASSCAQFVLKGFNFLLSNSRLLCALEGKYLVQDSCYDLIDSADAVNGHQELQHLSFSCHVPNVTGRGFIEVEDNGLSSCSFPFIVAEQEICLEICKLENVIEAAETADDNQIKTNLMEEKTQALYFIQEMGWLLHRSRVKVRLGPMAPVQDRFHFNRFIWLVGFSMDHDWCAVMKKLLNIIFEGTVDTGDHASVELALLEMGLLHKAVKRNCRPMVEILLKFVPKQVNKSPDRFIFRPDTVGPVGLTPLHVAASMHGSENVLDALTDDPGMVGTEAWKSAQDATGLTPYDYASMRGYYSYIQLVQSKTSNTCKSQHVLDIPGTLVDSNTKQKQSDRHRSSKVSSLQTEKIETTAMPRRCGLCQQKLAYGGMRRALVYRPAMLSMVAIAAVCVCVALLFKSSPKVYYVFQPFSWESLEYGSI

SEQ ID NO: 32431 - protein, 142 aa, Glycine max
  Clone ID: TF_GmC368_1.pep
MDTSRSEGKRVMRYKEEDDDNDDEEEEEVVSEMGFEEDGRRNKRVIRDLYGKRGSKGGGSITPSCQVDNCDADLSEAKQYHRRHKVCEYHAKAPSVHMAGLQQRFCQQCSRFHVLSEFDDSKRSCRTRLAGHNERRRKYAVD

SEQ ID NO: 32432 - protein, 185 aa, Glycine max
  Clone ID: TF_GmC47481_1.pep
MERERALFERVRKNSTVEEEVENEVEEEDESGVSITEEEKKKGVGSSGGRRGSSGGSGGVSPPSCQAERCGADLTDAKRYHRRHKVCEFHSKAPVVVVAGLRQRFCQQCSRFHDLAEFDESKRSCRRRLAGHNERRRKSNPEASNEGSTKGHHPKETTHCRLANERERIQMNLPGSSGYKSFNIR

SEQ ID NO: 32433 - protein, 133 aa, Glycine max
  Clone ID: TF_GmC39396_2.pep
MASDAKLSSSESLNGLKFGQKIYFEDVGLATPATSLTSSSSSSSAATVTSSSSSRKGRGGSVQPAQPPRCQVEGCKVDLSDAKAYYSRHKVCGMHSKSPSVIVAGLQQRFCQQCSRFHQLPEFDQGKRSCRRR

SEQ ID NO: 32434 - protein, 85 aa, Glycine max
  Clone ID: TF_GmC60889_1.pep
MVMVYSAAVMFSLLSRFHLLAEFDDGKRSCRKRLAGHNERRRKPQVGIHSGKAGRLLQPYAGNYLFLKLCYDKASLLSSILLGST

SEQ ID NO: 32435 - protein, 187 aa, Glycine max
  unsure (1)..(187): unsure at all Xaa locations
  Clone ID: TF_GmC39396_1.pep
MASDAKLSSSESLNGLKFGQKIYFEDVGFATPATSLTSSATTATTVTSSSSSSSRKGRGGSVQPAQPPRCQVEGCEVDLSNAKTYYSRHKVCGMHSKSPTVIVXAGLQQRFCQQCSRFHQLPEFDQGKRSCRRRLAGHNERRRKPPPSSLLTSRYARLSSSAFDHSGRGGNFLMELASYPKLSLRNS

SEQ ID NO: 32436 - protein, 280 aa, Glycine max
  unsure (1)..(280): unsure at all Xaa locations
  Clone ID: TF_GmC38724_1.pep
MGSASVTKAPPSSSSSPNSSSTESLDGLKFGQKIYFEEVSVAAAAATTTQGGNKTRGGVSASKKGRGGSVQAPRCQVAGCKVDLSGAKAYYSRHKVCAMHSKSPTVTVAGLEQRFCQQCSRFHLLSEFDQGKRSCRKRLAGHNERRRKPPPSSILTSRYGRLSXPIFDNNGRDDGFLMEFASYPKLTLRNTLPTQRSTEPAPGNHAATLTWQGGSDTPSEFFLQGSGSSGGTSFLNSKHPLVESYTGVTDSNCALSLLSSQTLGFRNTAPATKFELNNNL

SEQ ID NO: 32437 - protein, 70 aa, Glycine max
  unsure (1)..(70): unsure at all Xaa locations
  Clone ID: TF_GmC261392_2.pep
PQIVAKDTKESKTVSSPSGSSKRSRLQNGSQNMCCSVDGCNSDLSDCRDYHRRHRVCEKHSXTPXVLVGG

SEQ ID NO: 32438 - protein, 986 aa, Glycine max
  Clone ID: TF_GmC564_1.pep
MEAEFGAKNQYLYGPVVSGMKKAVVGNGKRSLEWDLNDWRWDGDLFTAQPLNSVPSDCRGRQFSPPHPEIPAKNANPSTTNLSYSVFISGEGKRELEKRRRGVIGEGEGEGLNYEAGSLSLNLAGQGYPLMVEEEEKSGKKTKVIGTNTTTTTTTTSNRAVCQVQDCRADLSNAKDYHRRHKVCDVHSKATMALVGNVMQRFCQQCSRFHVLQEFDEGKRSCRRRLAGHNRRRRKTHPDVSVVNEGSLNDQRDSNYLLMSLLRILTNLHSNGSDHTRNQDILSHLLKNLASLAGPNNGGRLAPLLEESKGLVNAGTHGADHDKPNLNSNAPEASRPSSSIKTDNGIIAQDPPMSVVQGNLNNIDLNNVYNDIQNTVENHKKPYPPVASGMGFIDHASWLQCDSLKSSPPQTSRNSDSTSTQSPSSSSGEAQSRTDRIVFKLFGKDPSDFPLLLRSQILNWLSHSPTEIESYIRPGCIILTIYLRLEKSAWEELYCNLGSSLRKLLAASNDSFWRTGWVYARVQHAVAFLYNGQVVLDVPLRLKSPQHCMISCINPLAVPASASAQFIVKGFNLSQSSTRLHCALEGKYLVHASCHDLIGGADAPIQHLSFSCQIPSVTGRGYTTDGDHGLSSCSFPFIVAEQEVCSEICKLENVIEEAETTDDIQIKNQHMEEKTQALDFLQEMGWLLHRSHVKFKLGSMAPFHDLFQFNRFAWLVDFSMDHGWCAVMKKLLDIIFEGGVDAGEHASIELALLNMGLLHRAVKRNCRPMVELLLRFVPVKTSDGADSEMKQVAEAPDRFLFRPDTVGPAGLTPLHVAASMSGSENVLDALTNDPRMVGIEAWKSARDSTGLTPNDHACLRGYYSYIQLVQNKTNKKGERQHLVDIPGTVVDSNTTQKQSDGNRTCRVPSLKTEKIETTAMPRQCRACQQKVAYGGMKTAMVYRPVMLSMVTIAVVCVCVALLFKSSPRVYYVFQPFNWESLEYGAM

SEQ ID NO: 32439 - protein, 88 aa, Glycine max
  unsure (1)..(88): unsure at all Xaa locations
  Clone ID: TF_700734849H1.pep
AHPYTVACLVDGCNSDLSNXRDYXHRRHKVCELHSXTPEVTIGGFKQRFCQQCSRFHSLEQFDERKRSCRKRLDGHNRRRRXPQPEPL

SEQ ID NO: 32440 - protein, 81 aa, Glycine max
  Clone ID: TF_LIB4390-055-R1-K2-H7.pep
KELVLLYFFSSRFHLLSEFDNGKRSCRKRLADHNRRRRKTQQIAQEIHKSQHSLDNVARSLPESGAQSSSSSGKVAVRVTP

SEQ ID NO: 32441 - protein, 339 aa, Glycine max
  unsure (1)..(339): unsure at all Xaa locations
  Clone ID: TF_GmC422_1.pep
MLDYEWGNPSTIMLTGNEDSSAAGSDQTHRQIFDHYASXHTHPRPLPTRANALHRHHRRRNHRGFHPSTTSPRNPTTIXHMNHHHHTMPSSTHALXHGASNTSYPPPPSMLSLDPLPHVNAVGSGPGHGPGPGPGPGGLLLVPKSEEVGRPMDFVGSRIGLNLGGRTYFSSSEDDFVSRLYRRSRPVEPGSTISSNSPRCQAEGCNADLSQAKHYHRRHKVCEFHSKAATVIAAGLTQRFCQQCSRFHLLSEFDNGKRSCRKRLADHNRRRRKTQQPTQEIQKSQPSLDNVARSPPDSGAQSSSSVTVAVSPPDYFRQRPYQSTNNPSSISSSLFFSSG

SEQ ID NO: 32442 - protein, 211 aa, Glycine max
  Clone ID: TF_GmC663_1.pep
MDQVAPPPILMHRKRDLSYAVVSPAPNPSWSWDWDSVRFAGKPPPPLSSPNDDVVFEESVAPPLQLNLGGRTNNSNSNKRVRSGSPGTSSYPMCQVDNCREDLSKAKDYHRRHKVCEAHSKASKALLANQMQRFCQQCSRFHPLSEFDEGKRSCRRRLAGHNRRRRKTQPEDVTSATPAPAAAANLEIFDLLTAIAGASQGKFEEKRSQVP

SEQ ID NO: 32443 - protein, 291 aa, Glycine max
  unsure (1)..(291): unsure at all Xaa locations
  Clone ID: TF_GmC95509_1.pep
MECNAKSLGQWDWEHLFFFNTKAAENPRLQPTDCSSEADREINVGMLYPSGGSACSGSELIHASSSRSSKSASNNSSSNGDSRESILTLEGSHDDSTGKKELCNGEPVETSPAAVPSPVSGEPLLTLKLGRRLYFEDVCTASDSKKPSSFEVPILSGKKYKTSSQAVQHPSCQVEGCGLDLSSAKDHHRKHRVCEAHSKSPKVVITGLERRFCQQCSRFHCXLSEFDDKKRSCRQHHFATNSSRSKSQPDSILLNPSALSTSPYDGRQIVNTFAFSRTPIDLAWQDMNPQT

SEQ ID NO: 32444 - protein, 187 aa, Glycine max
  Clone ID: TF_GmC325872_1.pep
MEIKSRERIQVSIEKVRRDSTVEVEDEEEEDESVVGGEGGLAEDEKKKGGGGSGRRGSSGFFPPSCQAEMCGADLTVAKRYHRRHKVCELHSKAPSVMVAGLRQRFCQQCSRFQELAEFDEAKRSCRRRLARHNERRRKSNAETCNEGCSGSKGQHPTESHCRNADVWGRIQMNIAKNSGYNSFHIR

SEQ ID NO: 32445 - protein, 393 aa, Glycine max
  unsure (1)..(393): unsure at all Xaa locations
  Clone ID: TF_GmC53350_1.pep
MDWNLRCEKTTEGEVDQANLPNMETMEGSSRYGMYRTKGEFSVDLKLGQVGNSGRESSVLTKSKDGGAVGVSKMISSSSSGSAKRARSLSNGTQTVSCLVDGCHSDLSNCRDYHRRHKVCEVHSKTAQVTIGGQKQRFCQQCSRFHSLEEFDEGKRRNSKKIIIFSFHDLQXYQHTRKSMTKFSSNFXGTQLLPFSSSHEYPSTTVVNPTWGGVLTTSGDVRLHGHNQHHHQVHLADKQDLFLGSSPAGYKEGKQLAFMQGDHTLNNRSPHLPGASVGQAQMFLRTSLYSESDGLRCKMFCDSLTSSIQDNNTSRALSLLSSPPQPLSPGNGLNLMVNSHSPLMQPLGLSLHDNSLGSVDPVLGPNDSSSMYNIGSNGSQGNEAPPLFPFQWE

SEQ ID NO: 32446 - protein, 182 aa, Glycine max
  Clone ID: TF_GmC7371_4.pep
GVWGKRSSEWDLNDWRWDGDLFIASRLNPVPADGVGVGQQFFPIGSAGIPVAGGPSNSSSTSEEVDPRDPKGNKEGDKKRRVIVLEDDGLNEEGGTLSLKLGGHASAVVDREVGSWDGTNGKKSRVSGSTSNRAVCQVEDCSADLSKAKDYHRRHKVCEMHSKASRALVGNAMQRFCQQCSR

SEQ ID NO: 32447 - protein, 77 aa, Glycine max
  Clone ID: TF_jC-gmXLIB3564P117ae07a1.pep
MVEEEEKSGKKTKVIGAPTASTTPASNRAVCQVQDCRADLSNAKDYPRRHKVCDIHSKAPMALVGNVMQRFCQQCSR

SEQ ID NO: 32448 - protein, 146 aa, Glycine max
  Clone ID: TF_GmC130710_1.pep
ALVINCHMMLHYIPDETLSDTTGLTSFLYDSSSLAASSAVSVTPTSSLRSLFLKSLRGLDPTVVILVDEDADLTSNNLVCRLRSAFNYLWIPYDTVDTFLPRGSKQRQWYEADICWKIENVIAHEGVQRVERVEPKNRWEQRMKNA

SEQ ID NO: 32449 - protein, 157 aa, Glycine max
  Clone ID: TF_uC-gmrominsoy069c09b1.pep
MLQFKRGLEEASKFLPRRPQLFTGLESTAVSAEPKGKGVALKMENSIGVRSRKNHARQDEEEEEERSNKQSAVSAVCVEEESEISEIFDRVLLSVENVPLCAEKNGSVAQAEKSNLSDGGKVRSKRQGRKKETVDLRTLLIMCAQAVSFSDNRTANE

SEQ ID NO: 32450 - protein, 132 aa, Glycine max
  Clone ID: TF_15203660.pep
MTVKGSGKNEERELLQKMDTNIALKCHLKVPFNQVMQFTGIQAIVEHVACETKIHLIDLEIRSGVQYTALMQALAERRDRIVQLLKITAIGLSSLKTMIEETGKRLASFAESLNLPFSYKTVFVTDIAEIRE

SEQ ID NO: 32451 - protein, 145 aa, Glycine max
  unsure (1)..(145): unsure at all Xaa locations
  Clone ID: TF_LIB3092-002-Q1-K1-C1.pep
PTRPEKKVHIIDFDISQGTQYITLIQTLASMPGRPPRVRLTVVDDPESVQRSIGGINIIGQRLEKLAEELRLPFEFRAVASRTSIVSPSMLNCRPGEALVVNFAFQLHHMRDETVSTVNERDQLLRNVKSLNXKIGTVVEQDMNT

SEQ ID NO: 32452 - protein, 74 aa, Glycine max
  Clone ID: TF_LIB3242-464-P1-K1-D8.pep
CEGAKRVERHELLKKWRSRFTMAGFTPYPLNSFVTCSIKNLQQSYQGHYTLEERDGALCLGWMNQVLITSCAWR

SEQ ID NO: 32453 - protein, 112 aa, Glycine max
  Clone ID: TF_jC-gmst02400046a06a1.pep
QKATENNNLAVAEALVKQIGFLALSQVGAMRKVATYFAEALARRIYRVFPQQHSLSDSLQIHFYETCAYLKFAHFTANQAILEAFQGKNRVHVIDFGINQGMQWPALMQALA

SEQ ID NO: 32454 - protein, 201 aa, Glycine max
  Clone ID: TF_LIB5118-051-A1-PF1-F2.pep
FLVLKFTPLLQSLGEVIDVSMLHVKPGEAVAVHWLQHSLYDATGPDWKTLKLLEELEPRIITLVEQDVNHGGSFLDRFVASLHYYSTLFDSLGAYLHNDDSNRHRVEHGLLSREINNVLAIGGPKRSGEDNFRQWRSELARHCFVKQVPLSDNSMAQAQLILNMFSPAYGYSLAQVEGTLRLGWKDTSLYTASAWTCCNSS

SEQ ID NO: 32455 - protein, 271 aa, Glycine max
  Clone ID: TF_GmC121075_1.pep
MDTTLFRVVSSFQHQHQPDHDQSLNNSTTSSSSRSSRQQQNYPYPQEDEECFNFFMDEEDLSSSSSKHYCPYQPHPPSTTTIHHSFSPTPCDFEFSGKWAQDILLETARAVADKNTTRLQQLMWMLNELSSPYGDTDQKLASYFLQAFFSRISQAGDRTYRTLASASEKTCSFESTRKTVLKFQEVSPWTTFGHVASNGAILEALEGEPKLHIIDISNTYCTQWPTLFEALATRNDDTPHLRLTSVVTADATAQKLMKEIGARMEKFARLM

SEQ ID NO: 32456 - protein, 99 aa, Glycine max
  Clone ID: TF_LIB5068-031-A1-XP1-G9.pep
ESMHTCHSHIIASLTYFLCSNAFDIFLYSKRICIDLICLPMFVPKTEFEHLRKTQALRSFSYASLMFRKTGPLWFTSCSTIVTPLGFNFLTVSTDQFIN

SEQ ID NO: 32457 - protein, 203 aa, Glycine max
  unsure (1)..(203): unsure at all Xaa locations
  Clone ID: TF_LIB4281-013-R1-K1-H3.pep
HASGPYFKFGYMSANGAIAEALKEEIEXHIVDFQIGQGTQWVSLIQALAHRPGGPPKIRISGVDDSYSAYARGGGLDIVGKRLSAHAQSCHVPLXFNAVRVPASQVQLEDLELLPYEXLXAVNFAISLHHVPDXSVNSHNHRDRLLRLAKRLSPKVVTLAEQEFNTNNAPFLQRFDETMKYYLAGFESIDTVLPGDXXXRLMW

SEQ ID NO: 32458 - protein, 288 aa, Glycine max
  Clone ID: TF_GmC30861_1.pep
MQASEQHRNSSMYYQPLQQIEAYCLPQYRTLNPQLYYHDGGHGTQFSTPSSSELYCTLESSSVALYNSPSTVSFSPNGSPISQQDSQSYPPDQYHSPENTYGSPMSGSCITDDLSSFNLKHKLRELESVMLGPDSDNLDSYDSAISNGNNFVPLEMDGWKQTMVAISSKNLKHILIACAKAISDNDLLMAQWLMDELRQMVSVSGDPFQRLGAYMLEGLVARLAASGSSIYKSLRCKEPESAELLSYMHILYEVCPYFKFGYMSANGAIADAMKDEDRVHIIDFQIGQ

SEQ ID NO: 32459 - protein, 163 aa, Glycine max
  Clone ID: TF_jC-gmfl02220090c02d1.pep
ARGGEEDGCADGVRLVQLLIACAEAVACRDKSHASILLSELKANALVFGSSFQRVASCFVQGLIERLNLIQPIGPAGPMMPSMMNIMDVASDEMEEAFRLVYELCPHIQFGHYLANSTILEAFEGESFVHVVDLGMSLGLRHGHQWRGLIQNLAGRVSGERVR

SEQ ID NO: 32460 - protein, 198 aa, Glycine max
  Clone ID: TF_GmC890_1.pep
VKEHETVAVNCVLQLHKTLYDGSGGALRDFLGLIRSTNPSVVVVAEQEAEHNENRLEGRVCNSLKYYSALFDSIDESGLPQESAVRVKIEEMYAKEIRNIVACEGRERVERHESFGNWRRMMVEQGGFRCMGVTERELSQSQMLLKMYSCESYSVKKQEKEGATGVTLSWLEQPLYTVSAWGPVDAAAGTSSSFSQPS

SEQ ID NO: 32461 - protein, 111 aa, Glycine max
  Clone ID: TF_LIB3139-046-P1-N1-E1.pep
MASPRCPPRENTKPQEFKLHTQERAVKRAMCGSEVELENLVIQPGEALVVNFPFVLHHMPDESVSTENHRDRLLRLVKSLSPKVVTLVEQESNTNTSPFFQRFAETLSYYT

SEQ ID NO: 32462 - protein, 198 aa, Glycine max
  Clone ID: TF_GmC151_1.pep
SAIASRNWETIQIEDLKIERNELLAVNCLVRFKNLLDESIEVNSPRNAVLNLIRKMKPDIFVHSVVNGSYNAPFFLTRFREALFHYSSIYDMFDTLISRENEWRLMLEREFLGREIMNVVACEALERVERPETYKQWQARNTRAGFKQLPLDKEIMTKFRGKLREWYHRDFVFDEDGNWMLQGWKGRIILYASTCWVP

SEQ ID NO: 32463 - protein, 568 aa, Glycine max
  Clone ID: TF_GmC374_1.pep
MDLNQFLNFNVISSEGFPCTSSCTPISPISNQLLGSLKLDIGNSPNSALSSHFDSDTLSSALSDSQELHTSGEIHSGVNSCKSLQESNHYLHRPVSFVDHLQDGLHLSTRSFLPQDASYDHETRHALLELETALMAPDGEDQITTSSTSLGVGSRPTTSCQRNRSWSSEGQSSDVAHVEKHHKSVEEESLQGFPSCNLKQLLIVCAKALSENNMQHFDQLIEKARSAVSITGEPIQRLGAYLVEGLVARKEASGNNIYHALRCREPEGKDLLSYMQLLYEICPYLKFGYMAANGAIAEACRNEDQIHIIDFQIGQGTQWVTLLQALAARPGGAPHVRITGIDDPLSKYVRGDGLEAVGKRLAAISQTFNIRVEFHGVPVLAPDVTKDVLDVRPGEALAVNFPLQLHHTADESVDMSNPRDGLLRLVKSLSPKVTTLVEQESNTNTTPFFNRFIETLDYYLAMFESIDVSLPRKSKVQINMEQHCLARDIVNIIACEGKERVERHELLGKWKSRLTMAGFRQYPLSSYMNSVIRSLLRCYSKHYNLVEKDGAMLLGWKDRNLISTSAWY

SEQ ID NO: 32464 - protein, 92 aa, Glycine max
  Clone ID: TF_GmC359_4.pep
MVERELYGREIMNVIACEGSDRIERPETYKRWQVRNMKAGFKQLPLNEELMAKFRSKLKEYHRDFVLDENNNWMLQGWKGRILFASSCWVPA

SEQ ID NO: 32465 - protein, 93 aa, Glycine max
  Clone ID: TF_GmC359_5.pep
MLERELLGREIMNVIACEGSERIERPETYKQWYVRNTRAGFKQLPLNEELMAKFRTKLKEWYHRDFVFDEDNKWMLQGWKGRILYASTCWVPA

SEQ ID NO: 32466 - protein, 179 aa, Glycine max
  unsure (1)..(179): unsure at all Xaa locations
  Clone ID: TF_LIB3138-095-Q1-N1-E2-F2B.pep
NESSIHIIDFGISYGFQWPCLIQRLSERPGGPPKLRMMGIDLPQPGFRPAERVEETGRWLEKYCKRFGVPFEYNCLAQKWETIRLEDLKIDRSEVTVVNCLYRLKNLSDETVTANCPRDALLRLIRRINPNIFMHGIVNGTYNAPFFVTRFREALFHFSSLXDMFEANVPREDPSXLMI

SEQ ID NO: 32467 - protein, 506 aa, Glycine max
  Clone ID: TF_GmC640_28.pep
MVSTSVCPGVFTSQQQQEFGVGDEKPQVINPQFMLNQNQVQFSENPSFFVPLMYPQVQVQEQQVFSPPHQSKRPLFDTIGHNFQAPRLPLLDSGQEVFGRRQQTQLPLFPHHMQQQQQQQQSMGLPSAKQQKVSSTGDDASHQFQQAIFDQLYKTAELIEAGNPVHAQGILARLNHQLSPIGKPFQRAAFYMKEALMSLLHSNAHSFMAFSPISFILKIGAYKSFSEISPVLQFANFTCNQALIEAVERFDRIHVIDFDIGFGVQWSSFMQELALRSSGAPSLKVTAIVSPSTCDEVELNFTRENLIQYAKDINVSFELNVFSIESLNSASCPLLGQFFDNEAIAVNMPVSSFTNYPSLFPSVLHFVKQLRPKVVVTLDRICDRIDVPLPTNVVHVLQCYSALLESLDAVNVNLDALQKIERHFIQPAIKKIILGHHHSQEKLPPWRNLFIQSGFSPFTFSNFTEAQAECLVQRAPVRGFHVERKPSSLVLCWQRKELISVSTWRC

SEQ ID NO: 32468 - protein, 473 aa, Glycine max
  Clone ID: TF_GmC978_1.pep
PGFEGSSSVNSSPLQFFSMMSLSPSLGSPNNLLFREMKSEERGLYLIHLLLTCANHVAAGVPENANTTLEQISMLASPDGDTMQRIATYFMESLADRILKTWPGIHRALNSTRMTLISDEILVQKLFFELFPFLKVAFVLTNQAIIEAMEGEKVIHIIDLNAAEAAQWIALLRVLSAHPEGPPHLRITGVHQKKEILDEVAHRLTEEAEKLDIPFQFNPVASKLENLDFDKLRVKTGEALAISSILQLHTLLAWDDEAMQRKSPLLLKSSNGIHLQRVLPMGQSTLGDLLEKDMVNGYTPSPDSTSSSPSSLTTSNSMKRERFLNALWGLSPKVMVVTEQDCNHNGPTLMDRLLEALYSYAALFDCLESTVSRTSLERLRVEKMLFGEEIKNIIACEGSERKERHEKLEKWFQRFDLAGFGNVPLSYFGMVQARRFLQSYGCEGYRMRDENGCVLICWEDRPMYSISAWRSRK

SEQ ID NO: 32469 - protein, 144 aa, Glycine max
  Clone ID: TF_LIB3242-303-Q1-J1-D1.pep
LKNKLRELEISLLGPDSDIVDSCGCSYKGGCHGASPMAKYNWDQIVEMIPKLNLKEVLIRCAQAVADDDIETAVGFMNNVLAKMVSVGGDPIQRLGAYMLEGLRARLESSGSIIYKALKCEQPTSNDLMTYMHILYQICPYWKF

SEQ ID NO: 32470 - protein, 578 aa, Glycine max
  unsure (1)..(578): unsure at all Xaa locations
  Clone ID: TF_GmC1018_5.pep
MPSSFSMDSQQLFSFELPYMSSLPTVPSLLGSLKYDTGNSPNSPFSTYFDSDTLSALSDGQEQYSPGEILSGVSPSCNSSLETNHYMYRSVSTLDSFPLYSDRNSLLQTMSSNQKIQHALLELETALMAPDDDQVNTPNTLAESSRPMASGQRSRSWSNENHVSQYTQTQPSYATANMQSSEVVHVEKRQKLMEEATLQDFPPNNLKQLLIACAKALSENNTKDFDQLVGKAKDAVSINGEPIQRLGAYMVEGLVARMQASGNSIYHALRCKEPEGEELLTYMQLLFEICPYLKFGYMAANGAIAQACRNEDHIHIIDFQIAQGTQWMTLLQALAARPGGAPHVRITGIDDPVSKYARGDGPEVVGKRLALMSEKFGIPVEFHGVPVFASDVTREMLDIRPGEALAVNFPLQLHHTADESVHVSNPRDGLLRXGKVTFSQGDHIGGAGIKHKHNPFLQQVHXKPWITTWQSLSPLMSPSQETARRGLMWSNIVXARDIVNIIACEGKERVERHELFGKWKSRLKMAGFQQCPLSSYVNSVIRSLLRCYSEHYTLVEKDGAMLLGWKDRNLISASAWHC

SEQ ID NO: 32471 - protein, 597 aa, Glycine max
  Clone ID: TF_GmC589_1.pep
VNKRRTMSLVISTELADTSYGNAKLYTLKGTDVTPDLSSHNFAPDKHRNMYMTKSYSCESYEKYFHDSPTEELIEPSSSSISGNSVHPDGASSYLLRASSGASVIVNNPFDTSIWSTRHRDAYQSNSVSDFVENGSPDGLDFDGEMRLKLQELERALLSDEEEEEQGIFETVQSMEIDPDMVEWANPLQDMLLHDSPKESSSSDSSNLSSISSTTKDTSQNSPQTPKQLLYDCARILSEGNEQEATSMINKLRQMVSIQGDPSQRIAAYMVEGLAARVATSGKCIYQALRCKEPPSNDRLAAMQILFEVCPCFKFGYIAANGAIAEAVRDEKKVHIIDFDISQGTQYITLIQTLASMPGRPPHVRLTGVDDPESVQRSIGGINIIGQRLDSSRSSRFGSSEFRAVASGTSNVTQSMLDCRPGEALVVNFAFQLHHMRDETVSTVNERDQLLRMVKSLNPKLVTVVEQDMNTNTSPFLPRFVEAYNYYSAVFNTLDATLPRESQDRMNVERQCLAKDIVNIVACEGEERIERYEVAGKWRARLSMAGFTPSPMSTNVREAIRKLIIKQYCDKFKIKEEMGGLHFGWEDKNLIVASAWK

SEQ ID NO: 32472 - protein, 503 aa, Glycine max
  Clone ID: TF_GmC6703_1.pep
MDTLFRLVSFHQQQQPQQQPDPSLNSTTSRTSSSSRSSRQNYYPYSHQEEEECFNFYMDEEDLSSSSSKHYYHPYQPHHHQQHNVSNISTNTFSTTPNTDYSYSYSFSPTQPVQDFNFEFSSPNWSHNLLLESARAVADNNSTRLHHLLWMLNELSSPYGDTEQKLAAYFLRALFSRVTEAGDRTYRSLASASEKTCSFESTRKTVLKFQEVSPWTTFGHVASNGAILEALEGNSKLHILDISNTYCTQWPMLLEALATRSEETPHLCLTTIVTGSRIGNNVQRVMKEIGTRMEKFARLMGVPFKFNVVHHYGDLSEFNFSELDIKDDEALAVNCVNSLHSVSALGNNRDALISALQALQPRIVTVVEEEADLDVGIDGYEFVKGFEESLRWFRVYFEALDESFVKTSNERLMLERAAGRAVVDLVACSPADSVERRETAARWAARLHNGGLNAAPFSDEVCDDVRALLRRYKEGWSMAACSDAGIFLSWKDTPVVWASAWRP

SEQ ID NO: 32473 - protein, 532 aa, Glycine max
  unsure (1)..(532): unsure at all Xaa locations
  Clone ID: TF_GmC1116_1.pep
MKCCDVICRGEEGMAAYMCADSGNLMAIAQQVIKQKQQQEQQQQQQQQQQQQQHLLHHQQNPLSLHTPIPWNNTPPLGYPLPPTTDFPPDPFQPDPPFHFQPDPHSFRFSDFDSDDWMDSLIAAADTTDFXLPPLRSQPAPSPTXLPPSPPPPPAQSPVDSDSDSSVHPLLXALAECASLAETEPDQAAESLSRLRKSVSQHGNPTQRVGFYFWQALSRREEKGHNSTWDEELTLSYKALNDACPYSKFAHLTANQAILEATQTASNIHIVDFGIVQGIQWAALLQAFATRPSGKPNKIRISGIPAVSLGPSPGPSLSATGNRLSDFARLLDLNFVFTPILTPIHQLDHNSFCIDPNEVLAVNFMLQLYNLLDEPPSAVDTALRLAKSLNPRIVTLGEYEASVTRVGFVNRFRTAFKYFSAVFESLEPNLAADSPERFQVESLLLGRRIAAVIGGPGSVRRESMEDKEQWRVLMERAGFESVSLSHYAISQAKILLWNYSYSSLFSLVESTPPGFLSLAWKDVPLLTVSSWR

SEQ ID NO: 32474 - protein, 94 aa, Glycine max
  Clone ID: TF_GmC154430_1.pep
KRAKMEQFYFAEEIKNIVSCEGPLRMERHERVDQWRRRMSRAGFQAAPIKMVAQSKQWLLKNKVCEGYTVVEEKGCLVFGWKSRPIVAVSCWKC

SEQ ID NO: 32475 - protein, 522 aa, Glycine max
  unsure (1)..(522): unsure at all Xaa locations
  Clone ID: TF_GmC510_1.pep
MPTNRSVFMFRYIPISALTTLLAPTTGPCPWTGPNFGYRNSNLGFPPIQNRVRLSPPVSVPVQVQSSEPEKKIMDHRLLELEKQLLEDNDEXGEADAASGITTSEWSESVPVRFSXPVLTPTSPTSSTTSSTSSSSSVASPASGCSKQTLMEAASAIVEGKHDVAAEILNRLNGVNRSDRLTDCMVSALKSRMNPVEYPPPVAELFRKEHADSTQMLLENSVLLLDNSVCFKVGFMAANYAILEAAFEEKTENNRFCVVDFEIGKGKQYLHLLNALSARDQNAVVKIAAVAEKGGEERVRAVGDMLRLLAERLRIRFEFKIVATQKIAELTRESLGCDADDVLMVNFAFKLNKIPDESVSPENPRDELLRRVKRLAPRVVTVVEQEINGNTAPFLARVAETLSYYGALLESIEATTVGKDNSINNSDRVRLEEGLSRKLHNSVACEGRDRVERCEVFGKWRARMSMAGFELKPLSQSMVESIKARLISANNRVNSGLTVKEENGGICFGWMGRTLTVASAWR

SEQ ID NO: 32476 - protein, 262 aa, Glycine max
  Clone ID: TF_GmC977_1.pep
DFGIRYGFQWPALIYRLSKQPGGPPKLRITGIELPQPGFRPAERVQETGLRLTRYCDRFNVPFEFNAIAQKWETIKIEDLKIKENELLVANAMFRFQNLLDETVVVNSPRDAVLKLIRKANPAIFLHANVNGSYNAPFFVTRFREALFHYSTLFDVLDTNVACEDPMRLMFEREFFGRQVMNIVACEGCERVERPETYKQWQVRNMRAGFKQLPLDKHLINKLRCKLKDAYHSDFMLLEDDNYMLQGWKGRVVYASSCWVPA

SEQ ID NO: 32477 - protein, 266 aa, Glycine max
  unsure (1)..(266): unsure at all Xaa locations
  Clone ID: TF_GmC194417_1.pep
LASGSSLLLSPKRHPLESPDGNSSNSTTDSANSHDLKPSSPNTPASDALHSSSHAPSLVVPPHALTKINDGTVDLDSSVTKLLAENIFSDADSMLQFKRGLEEASKFLPQGPQLFTGLESPTVSSEPKGRGVALKMENSFGVKNRKNHARQDDEEERSNKQSAVSAVCVEEESEISEIFDRVLLSVENVPLCAENNGSVAVGDSNTKLIEKSSLSDGGKGSIQEAREKEETVDLRTLLVLCAQAVSFSDNRTXYELLKQISSILLL

SEQ ID NO: 32478 - protein, 94 aa, Glycine max
  Clone ID: TF_GmC104019_2.pep
PRVRNVEQHCLARDLVNIIACEGVERVERHEVLGKWRSRFAMAGFTPYPLSSLVNGTIKKLLENYSDRYRLQERDGALYLGWMNRDLVASCAWK

SEQ ID NO: 32479 - protein, 316 aa, Glycine max
  Clone ID: TF_GmC1018_1.pep
SLKVNCESLTCNCYYEICPYLKFGYMAANGAIAQACRNEDHIHIIDFQIAQGTQWMTLLQALSKYARGDGLEVVGNRIINPCDPNMGIDDPVSKYARGDGLEVVGKRLALMSEKFGIPVEFHGVPVFAPNVTREMLDIRPGEALAVNFPLQLHHTADESVHVSNPRDGLLRLVRSLSPKVTTLVEQESNTNTTPFFNRFIETLDYYLAIFESIDVTLPRDSKERINVEQHCLARDIVNIIACEGKERVERHELFGKWKSRLTMAGFRQCPLSSYVNSVIRSLLMCYSEHYTLVEKDGAMLLGWKDRNLISASAWHC

SEQ ID NO: 32480 - protein, 202 aa, Glycine max
  unsure (1)..(202): unsure at all Xaa locations
  Clone ID: TF_GmC538_1.pep
VEFEYNAIAKKWETIQLEELKIDRDEYLVVTCFYRXKNVLDESVVVDSPRNKFLSLIRKINPNIFIHGITNGAFNAPFFVTRFREALFHYSSLFDMLEAIVSREEWERMLIEKEIFGREALNVIACEGCERVERPETYRQWQARILRAGFLQQPFEREIVKRAIEKVTTSYHKDFVIDEDSQWLLQGWKGRIIYALSCWKPA

SEQ ID NO: 32481 - protein, 505 aa, Glycine max
  Clone ID: TF_GmC164_1.pep
MASSSSNGSSSGSKSWDIDGDLAGFGYKVRSSELQHVAENMERLENVMDIVNSSTNNNISQLASDTVFYNPSDIGSWVDTLLSEFDQTASLPYDFSDFLDLDTDQNQNHKPTLVTMEEDSGIRLVHTLMTCADSVQRGDLAFAGSLIENMQGLLAHVNTNIGIGKVAGYFIDALRRRILGQGVFQTLSSSSYPYEDNVLYHHYYEACPYLKFAHFTANQAILEAFNGHDCVHVIDFNLMQGLQWPALIQALALRPGGPPLLRLTGIGPPSSDNRDTLREIGLRLAELARSVNVRFAFRGVAAWRLEDVKPWMLQVNPNEAVAVNSIMQLHRLLASDSDPIGSGIETVLGWIRSLNPKIISVVEQEANHNQDRFLERFTEALHYYSTVFDSLEACPVEPDKALAEMYLQREICNVVSSEGPARVERHEPLAKWRERLEKAGFKPLHLGSNAYKQASMLLTLFSAEGYSVEENQGCLTLGWHSRPLIAASAWQAAPMQDRETLRFEQ

SEQ ID NO: 32482 - protein, 416 aa, Glycine max
  Clone ID: TF_GmC359_8.pep
EIVCNERCSSQSETVKAVEPGGVKGLPNNRATYQETVDLRNLLMMCSQSVYANDIRAANELLKQIRQHSSPIGDASQRLAHYFANGLEARLVGDGTSTQGMYTFLSSKNNTFSELLKAYQVFSSSSPFKKFAYLFENTMIMKAAASAETVHIIDFGILHGFQWPMLIRLLSNREGGPPKLRITGIEFPQPGFRPTEKIEETGRHLANYCKRYNVPFEYNAISSRNWETIQLEALKIASNELVAVYCHQRFENLLDECTIEVNSPRNAVLHLIRKINPDIFTHSITNGSYNAPFFTTRFREALFHYSAISDKNDTVISRENERRLMVERELYGREIMNVIACEGSDRIERPETYKRWQVRNMKAGFKQLPLNEELMAKFRSKLKEYHRDFVLDENNNWMLQGWKGRILFASSCWVPA

SEQ ID NO: 32483 - protein, 488 aa, Glycine max
  Clone ID: TF_GmC164_2.pep
MKMISSASNENKTVVDMDDHLAGLGYKVRSSELCQVAANMERLENVISSTDLSQLASDTTLYDPSNIGLGSWVDTLLSEFDQTASLPLQYDFATDPNHNKQLALVTTVEEDSGIRLVHMLMTCADSVQRGDFSFAGSLIENMQGLLAHVNTNCGIGKVAGYFIDALRRRISNTLPTSSSTYENDVLYHNYYEACPYLKFAHFTANQAILEAFNGHDCVHVIDFNLMQGLQWPALIQALALRPGGPPLLRLTGVGPPSAENRDNLREIGLRLAELARSVNVRFAFRGVAAWRLEDVKPWMLQVSLNEAVAVNSIMQLHRVTAVDAAVEEVLSWIRSLNPKIVTVVEQEANHNGEGFLERFTEALHYYSTVFDSLDACPVEPDKAALAEMYLQREICNVVCCEGPARLERHEPLAKWRDRLGKAGFRPLHLGFNAYKQASMLLTLFSAEGFCVQENQGSLTLGWHSRPLIAASAWQAAPLRDDETLRFGH

SEQ ID NO: 32484 - protein, 280 aa, Glycine max
  unsure (1)..(280): unsure at all Xaa locations
  Clone ID: TF_GmC163_1.pep
EISQLSTPFGTSAQRVAAYFSEAISARLVSSCLGIYATLPHTHQSHKVASAFQVFNGISPFVKFSHFTANQAIQEAFEREERVHIIDLDIMQGLQWPGLFHILASRPGGAPYVRLTGLGTSRKAPELVHSWGGXVGAINYYSALVDSLGSSYGEESEERXHVVEQQLLSREIRNVLAVGGPSRTGDPKFQNWREKLQQCGFRGISLAGNAATQASLLLGMFPSEGYTLVDLEGADMSWVGVFFSTRGNSYSTTFHERIPQKPFFTFIGSCTHFMSAFFLF

SEQ ID NO: 32485 - protein, 219 aa, Glycine max
  Clone ID: TF_700566412_FLI.pep
MTKDLALILHEFLCVQIMLPSRAESARAARGELELENLVIQPGEALVVNFPFVLHHMPDESVSTENHRDRLLRLVKSLSPKVVTLVEQESNTNTSPFFQRFVETLSYYTAMFESIDVALPRDDKQRINAEQHCVARDIVNMVACEGDERLERHELLGKWRSRFSMAGFAPCPLSSSVTAAVRNMLNEFNENYRLQHRDGALYLGWKSRAMCTSSAWRCY

SEQ ID NO: 32486 - protein, 129 aa, Glycine max
  Clone ID: TF_GmC3121_16.pep
KKIKVSLIQKSLNQDAKTNTPSTFVYIYKKHVYSLNRPRTRGPLETSEYILVLQPTLLLLHKTTTTTTTTSTKSKQLTTSTSVSSHLQLNQQTPRLSPRANSCSWLRRKPACVWSTLSWRARRPSSRRI

SEQ ID NO: 32487 - protein, 395 aa, Glycine max
  unsure (1)..(395): unsure at all Xaa locations
  Clone ID: TF_GmC359_9.pep
GGKGRSKKQGIRKKETVDLRNLLLMCSQSVYANDNRTANELLKQIRQHSSPVGDASQRLAHYFTNGLEARLVGDGTSAQGMYTFLSSKNITVAEFLKAYQVFTSSSPFKKFIHFFANKMIMKAAAKAETVHIIDFGILYGFQWPILIKFFSNREGGPPKLRITGIEFPQPGFRPAERIEETGHRLANYCKRYNVPFEYNAIASKNWENIQVEALKIQSNELVAVNCHLRFENLLDESIEVNSPRNAVLHLIRKINQDIFTQSITNGSYNAPFFATRFREALFHYSATYELIDTVIPRENEWRLMIERELLGREIMNVIACEGSQRIERPETYKQWQVRNTRAGFKKLPLNEELMAKLRTALXNGTTDFVLDEDNNWLLQGWKGHILYASTCWVPA

SEQ ID NO: 32488 - protein, 280 aa, Glycine max
  unsure (1)..(280): unsure at all Xaa locations
  Clone ID: TF_GmC112744_1.pep
MLQSLVPRSPRTSNPNAMKTKRAVDAGGDSPADEPSFKRTNFSGEKTTAEAEEEQAFDPEPHGGDSTGLKLLGLLLQCAECVAMDNLDFANDLLPEIAELSSPYGTSPERVGAYFAQALQARVVSSCIGSYSPLTAKSVTLTQSQKIFNAFQSYNSVSPLVKFSHFTANQAIFQALDGEDRVHIIDLDIMQGLQWPGLFHILASRSKKIRSVRITGFGSSSELLDSTGRRLADFASSLGLPFEFFPVEGKIGSVTELSQLGVRPNEAIVVHWMHHCLYXI

SEQ ID NO: 32489 - protein, 525 aa, Glycine max
  Clone ID: TF_GmC509_1.pep
MRVPVPSSPQANPKPTNNVVRTIALPNLNNSTTPPTGLCYEPTSVLDLCRSPSPGTEKPTTDHSVLVTNSQDYLDLEDHALHNLDWDSIMKDLGLHDDSATPVLKTFLHPDDDDDDDNNNNPSCDDFTLFDHALEFTTLSDIYSNQNFAFDFNHLPHDFNHLNGFDFIEELIRAADCFDTKQLHVAQLILERLNQRLRSPVGKPLHRAAFYLKEALQSLLSGSNRTPRISSLVEIVHSIRTFKAFSGISPIPMFSIFTTNQIVLDHAASSFMHVIDFDIGLGIQYASLMKEIAEKAADSPVLRITAVVPEEYAVESTLVRDNLAQFALDLRIRVQVEFVPLRTFENLSFKAVKFVDGENTAVLLSPAIFRHLGNAAAFLADVRRISPSVVVFVDGEGCAETATASAASFRRGVVSSLEYYSMMLESLDASTVVGGGEWVRRIEMMQLRPKILAAVESAWRRVPPWREAFYGAGMRPVQLSQFADFQAECLLAKSQIRGFHVAKRQNELVLFWHDRAIVATSAWRC

SEQ ID NO: 32490 - protein, 278 aa, Glycine max
  Clone ID: TF_GmC406_1.pep
SICNLSEDAKTIHIIDFGIRYGFKWPALISRLSRRPGGPPKLRITGIDVPQPGLRPQERVLETGRRLANYCKRFNLPFEFHAIAQRWDTIRVEDLKIETDEFVAVNCLFQFEHLLDETVVLNNPRDAVLRLIKNANPDIFVHGIVNGSYDVPFFVSRFREALFHYTALFDMLDTNVARQDPMRLMFEKELFGREIVNIIACEGFERVERPQTYKQWQLRNMRNGFRLLPLDHRIIGKLKDRLRDDAHNNNFLLEVDGDWVLQGWKGRILYASSCWVPA

SEQ ID NO: 32491 - protein, 119 aa, Glycine max
  Clone ID: TF_jC-gmst024114c12a1.pep
FTSLSDIYSNQNLAFDFNHLPHDFNHHLNGFDFIEELIRAADCFDTKQLHVAQVILERLNQRLRSPVGKPLQRAVFYFKEALQSLLSGSNRTPRISSLVEIVHSIRTFKAFSGISPIPM

SEQ ID NO: 32492 - protein, 461 aa, Glycine max
  Clone ID: TF_GmC588_1.pep
MRLSSVTSSPLQFFSMMSLSVSPSLGSPYQMKCEQRGLVLIHLLLAGANFVATGDLQNANLTLEQISQHASLDGDTMQRIASYFSEALADRILKTWPGIHRALNSSRITMVSDEILVQKLFFELLPFLKFSYILTNQAIVEAMEGEKMVHIVDLYGAGPAQWISLLQVLSARPEGPPHLRITGVHHKKEVLDQMAHKLTEEAEKLDIPFQFNPVLSKLENLDFNKLRVKTGEALAISSIMQLHSLLALDEDASRRKSPLLSKNSNAIHLQKGLLMNHNTLGDLLDGYSPSPDSASSSPAASSSALMNSESFLNALWGLSPKVMVVTEQDFNHNCLTMMERLAEALFSYAAYFDCLESTVSRASMDRLKLEKMLFGEEIKNIIACEGCERKERHEKMDRWIQRLDLSGFANVPISYYGMLQGRRFLQTYGCEGYKMREECGRVMICWQERSLFSITAWRPRK

SEQ ID NO: 32493 - protein, 327 aa, Glycine max
  Clone ID: TF_GmC7815_20.pep
MQTSQKHPSSAGVHFYHQPVQGIYQMLQSNLCHDSSSQGTSVSFETCKEQYFTLESCPAPTTCFVDCDDSPSYASVSSKRTPFSPQGSQSCYSDHQQSSDNTYGSPISGLSSVDDGHELKHKLRELEISLLGPEQSDSCGCCVVKGGLQGSSQLAKHNWDQIAENVAQFDLKGVLRVCAQAVSDDDVPTARGWMDNVLGKMVSVSGDPIQRLGAYLLEGLRARLESSGNLIYKSLNCEQPTSKELMSYMHILYQICPYWKFAYISANAVIEEAMANESRIHIIDFQIAQGTQWHLLIQALAHRPGGPPSLRVTGVDDSQSIHARGGG

SEQ ID NO: 32494 - protein, 255 aa, Glycine max
  unsure (1)..(255): unsure at all Xaa locations
  Clone ID: TF_GmC160039_1.pep
TSSGSVSNASSESQSLRLNDNVSEHEVGNGSGNPYYHHRKVEAGEEDDHHGFELVSLLTGCVDAIGSRNVTAINHFIAKLGDLASPKGTTSISRICAYFTEALAIRVTRLWPHVFHIAAATTSRDMVEDDESATALRLLNQVTPIPKFLHFTSNEMLLRAVEGKDRVHIIDFDSTRGLQWPSLFQSLASRSNPPIHVRITGIGESKQDLNETGERLAGFAEVLNLPFEFHPVVDRXRDVRLWMPHVKEHETGAVN

SEQ ID NO: 32495 - protein, 434 aa, Glycine max
  Clone ID: TF_GmC1774_1.pep
MDGLGSPSQWLRELRWDSQGLNPISLLIDCAKCVASGSIKNADIGLEYISQISSPDGNAVQRMVTYFSEALGYRIIKNLPGVYKSLNPSKTSLSSEDILVQKYFYELCPFLKFSYLITNHAIAEAMECEKVVHIIDLHCCEPTQWIDLLLTFKNRQGGPPHLKITGIHEKKEVLDQMNFHLTTEAGKLDFPLQFYPVVSKLEDVDFEKLPVKIGDALAITSVLQLHSLLATDDDMAGRISPAAAASMNVQRALHMGQRTFAEWLERDMINAYTLSPDSALSPLSLGASPKMGIFLNAIRKLQPKLVVITEQESNLNGSNLMERVDRALYFYSALFDCLDSTVMKTSVERQKLESKLLGEQIKNIIACEGVDRKERHEKLEKWIRRLEMAGFEKVPLSYNGRLEAKNLLQRYSNKYKFREENDCLLVCWSDRPLF

SEQ ID NO: 32496 - protein, 265 aa, Glycine max
  Clone ID: TF_GmC170_7.pep
EHFEWNCLQSSSRWLLLIQALASRPGGPPFVHVTGVDDSQSFHARGGGLHIVGKRLSDYAKSCGVPFEFHSAAMCGSEVELENLVIQPGEALVVNFPFVLHHMPDESVSTENHRDRLLRLVKSLSPKVVTLVEQESNTNTSPFFQRFAETLSYYTAMFESIDVALPRDDKQRINAEQHCVARDIVNMVACEGDERVERHELLGKWRARFSMAGFAPCPLSSLVTDAVRNMLNEFNENYRLGYRDGALYLGWKNRAMCTSSAWRCY

SEQ ID NO: 32497 - protein, 114 aa, Glycine max
  unsure (1)..(114): unsure at all Xaa locations
  Clone ID: TF_LIB3242-531-P1-J1-H3.pep
LRDLDIMQGLQWPGLFHILASRPGGAPYVRLTGLGTSMEALEATGKRLSDFANKLCLPFEFFPVAEKVGNLDPERLNGSKTEAGAVHXLQHSLYDVTGSDTNTLWLXLQRLAPK

SEQ ID NO: 32498 - protein, 612 aa, Glycine max
  Clone ID: TF_GmC3864_1.pep
AKNSREANNRRIMSLVRSADLAPTSYENAKLFSLKGTDVRPGLSSQIFGPDKHRSMYMTDAYSGECYEKYFHDSQTEELIEPSSSSISGSSIHPDVASSYQLRASSGASMVANNPSDSSFMSTRHHDAYQSNSGSDLMENGSLDSRDDEGLMRLRLKALERALLDDSDAGEDEEEEEEEEEDIFEAAQSMEIDPDIAEWADSIHNMLLHGSPKESSSSDSNTSSISSTKEISQTSQTPKKLLYECAIALSEGNEVEGSSMINNLRQMVSIQGEPSQRIAAYMVEGLAARLAESGKSIYKALRCKEPPTSDRLAAMQILFEVCPCFKFGFIAANNAITEAVKDDMKIHIIDFDINQGSQYINLIQTLASRSSKPPHVRLTGVDDPESVQRSVGGLRNIGQRLEKLAEALGLPFEFRAVASRTSIVTPSMLNCSPDEALVVNFAFQLHHMPDESVSTVNERDQLLRLVKSLNPKLVTVVEQDVNTNTTPFLPRFVEAYNYYSAVFESLDATLPRESQDRMNVERQCLARDIVNVVACEGEDRIERYEVAGKWRARMTMAGFTSSPMSTNVTDEIRKLIKTVYCDRYKIKEEMGALHFGWEDKNLIVASAWKLPR

SEQ ID NO: 32499 - protein, 180 aa, Glycine max
  Clone ID: TF_GmC167117_1.pep
MEDSEEEELLNLTLSVDAGRERRIKKGRTRDNNNNTNSVIIPMKSNDGYEGKIFRLLQMRELMLRQDHRRKGVLLEDVNNNNNDGLPLIHLLLSTATAVDDDQRNYCAALENLIDLYQTVSLTGDSVQRVVAYFADGLAARLLTKKSPFYDMLMGEPTSEEEFLAFTDLYRGSPYYQFAH

SEQ ID NO: 32500 - protein, 453 aa, Glycine max
  unsure (1)..(453): unsure at all Xaa locations
  Clone ID: TF_GmC42017_1.pep
MICHMKKREATSFLLSTPMIRSHLACLMRCCFVRMVRVPSIFYAGREPSPSQIADSRGSNGKKTRSKRGSNKGTRASVTTVDLWTLLIQCAQAVASFDQRTANETLKQIRQHSSPFGDGLQRLAHYFADGLEKRLAAGTPKFISFQSASAADMLKAYRVYRXVTNQIAMSNFLAIRTILKLALNEMVKKEYHNGFVVGEDGTWVFQRLSERPGGPPKLLMTGIDLPQPGFRPAERVEETGRWLEKYCKRFGVPFEYNCLAQKWETIRLEDLKIDRSEVTVVNCLYRLKNLSDETVTANCPRDALLRLIRRINPNIFMHGVVNGTYNAPFFVTRFREALFHFSSLFDMFEVNVPRERRRQKGIEKGVFGRDAINVIACEGAERVERPETYKQWQVRNQRAGFKQLPLAPEHVNRVKEMVKKEHHKDFVVDEDGKWVLQGWKGRILFAVSSWVPA

SEQ ID NO: 32501 - protein, 451 aa, Glycine max
  unsure (1)..(451): unsure at all Xaa locations
  Clone ID: TF_GmC640_32.pep
CTLRCRNSRFSLSIRRNTISLTPLGTIFKLQGCPFWIQGKKCLVGGSKHSFHCFLTICSNNNNNNQWLCLLLNSRRVSSTGDDASHQLQQAIFDQLYKTAELIEAGNPVHAQGILXARLNHQLSPIGRPFQRAAFYMKEALMSLLHSNAHSFMAFSPISFIFKIGAYKSFSEISPVLQFANFTCNQALIEAVERSDRIHVIDFDIGFGVQWSSFMQEIALRSSGAPSLKVTAIVSPSTCDEVELNFTRENLIQYAKDINVSFEFNVLSIESLNSPSCPLLGKFFDNEAIVVNMPVSIFTNYPSLFPSVLHFVKQLRPKVVVTLDRICDQMDVPLPTNVVHVLQCYSALLESLDAVNVNLDVLQKIERHFIQPAIKKIILGHHHFQEKLPPWRNLFMQSGFSPFTFSNFTEAQAECLVQRAPVRGFHVERKPSSLVLCWQKKELISVSTWRC

SEQ ID NO: 32502 - protein, 545 aa, Glycine max
  Clone ID: TF_GmC491_1.pep
MQMSQKHKMSYDSSRFSIEPAQNLGSCCFLQSGNLDYYSSSDNGSHATYPSVCIFEQYCTLESSTNNNFPSLNSPSTVSFSPNNSPVSKLQSKPNVLSSQNSLEIVDESLENKSFLTLNDDELRHKIRELESAMLGHDTDILDTYDTIIPEESDSFLKEAERWKRMMEMISRGDLKEMLCTCAKAVAGNDMETTEWLMSELRKMVSVSGNPIQRLGAYMLEALVARLASSGSTIYKVLKCKEPTGSELLSHMHLLYEICPYLKFGYMSANGAIAEVMKEESEVHIIDFQINQGIQWVSLIQAVAGRPGAPPKIRITGFDDSTSAYAREGGLEIVGARLSRLAQSYNVPFEFHAIRAAPTEVELKDLALQPGEAIAVNFAMMLHHVPDECVDSRNHRDRLVRLAKCLSPKIVTLVEQESHTNNLPFFPRFVETMNYYLAIFESIDVALPREHKERINVEQHCLAREVVNLIACEGEERVERHELLKKWRSRFTMAGFAPYPLNSFITCSIKNLQRSYRGHYTLEERDGALCLGWMNQVLITSCAWR

SEQ ID NO: 32503 - protein, 298 aa, Glycine max
  Clone ID: TF_GmC172_2.pep
TEHAESTQLLFEYSLFFKVARMVANIAILESALTESGKLCVVDFDICDENQYVSLLHELSARRKGAPAAVKIVVVTENCADDERLNIVGVLLGRHAEKLGIGFEFKVLTRRIAELTRESLGCDADEPLAVNFAYKLYRMPDESVSTENPRDKLLRRVKTLAPRVVTLVEQDANANTAPFVARVTELCAYYGALFDSLESTMARENLKRVRIEEGLSRKVVNSVACEGRDRVERCEVFGKWRARMSMAGFRLKPLSQRVADSIKARLGGAGNRVAVKVENGGICFGWMGRTLTVASAWC

SEQ ID NO: 32504 - protein, 545 aa, Glycine max
  Clone ID: TF_GmC829_1.pep
MQTSQNHKISYGSGGFYAEPVQNLESYCMPSSENIDNYSSSDNSSQTTYPSVQTLEQYCTLESASTGNSFPNQNSPPALSFSSNNSPLSKLESNSYVLRPQHSLEIASGSPEDDSYLTHDLDDLTHKIRELETAMLGPNADMLDIYGTVIPEPDSFLLEAEKWKKMMEISSRGDLKEMLYMCAKAMAVNDMETTDWLVSELRKMVSISGNPIQRLGAYILESFVARIGASGSTIYKSLKCSEPTGNELLSYMNVLYEICPYFKFGYMSANGAIAEALREESEVHIVDFQIGQGTQWVSLIQALARRPVGPPKIRISGVDDSYSAYARRGGLDIVGKRLSALAQSCHVPFEFNAVRVPATEVQLEDLELLPYEAVAVNFAISLHHVPDESVNSHNHRDQLLRLAKRLSPKVVTLVEQEFNTNNAPFLQRFDETMKYYLAVFESIDTVLPREHKERINVEQHCLAREVVNLIACEGEERVERHELLNKWRMRFTKAGFTPYPLSSVINSSIKDLLQSYHGHYTLEERDGALFLGWMNQVLIASCAWR

SEQ ID NO: 32505 - protein, 519 aa, Glycine max
  Clone ID: TF_GmC509_2.pep
VSEFGSSNHVLHTNNNPNTFTYEPTSVLDLCRSPSPEKKLTVPKPEPQHNNQLDLDDHVLPNSDWWESIMKDLTLPEDSPTPLLKTNPSCIPDFPPSSQDPSFDHPTPDFTSLSEIYNQNIPFNYPSNTLEPSFHDLNHSLHPHNNNWDFIEEFIRAADCYDSSHFQLAQAILERLNNRLLRSPMGKPLHRAAFHFKDALQSILSGSNRNGNGSNLLSSMAEIVQTIKTYKAFSGISPIPMFSIFTTNQALLETLNGSSFVHVIDFEIGLGIQYASLMKEIAEKAGPGTAPLLRITAVVPEEYAVESRLVRQNLNQFAQDLGISAQVDFVPLRTFETVSFKAVRFIDGEKIAVLLSPTIFSRLGGNGGSVGAFLADVRRMAPGVVVFVDGEGWTEAAAAASFRRGVVSSLEFYSMMLESLDASVASGGGGEWVSRIEMLLLRPKIFAAVEGARRRTPPWREAFYGAGMRPVQLSQFADYQAECLLAKVQIRGFHVDKRHAELVLCWHERAMVSTSAWRC

SEQ ID NO: 32506 - protein, 168 aa, Glycine max
  Clone ID: TF_GmC164_4.pep
AVKSAVEEVLGWIRILNPKIVTVVEQEANHNGEGFLERFTEALHYYSSVFDSLDACPVEPDKAALAEMYLQREICNVVCCEGPARLERHEPLAKWRDRLGKAGFRALHLGFNAYKQASMLLTLFSAEGFCVQENQGSLTLGWHSRPLIAASAWQAAPLGDDETLRFEH

SEQ ID NO: 32507 - protein, 254 aa, Glycine max
  Clone ID: TF_GmC1717_1.pep
VQWASLIQALASNKTGPPGPHLRITALSRTGSGRRSIATVQETGRRLAAFAASLGQPFSFHHCRLEPDETFKPSSLKLVRGEALVFNCMLNLPHLSYRAPESVASFLSGAKALKPRLVTLVEEEVASIVGGFVARFMDSLHHYSAVFDSLEAGFPMQGRARALVERVFLGPRIVGSLARMGEEEERGSWGEWLGAAGFRGVPMSFANHCQAKLLIGLFNDGYRVEELGSNKLVLDWKSRRLLSASLWTSSSHSD

SEQ ID NO: 32508 - protein, 61 aa, Glycine max
  Clone ID: TF_4282525.pep
VVTFANFTCNQTLLEAVEGLDRIDIIYSVIGLGGQRSSFMQELALKNGSAPELKITGFVLP

SEQ ID NO: 32509 - protein, 146 aa, Glycine max
  Clone ID: TF_GmC82216_1.pep
KLITTVEQDLSHAGSFLARFVEALHYYSALFDALGDGLGADSLERHTVEQHLLGCEIRNIVAVGGPKRTGEVKLERWGDESKRAGFGPVSLRGNPAAQASLLLGMFPWRGYTLVEENGSLKLGWKDLSLLIASAWQPSDLMITYPD

SEQ ID NO: 32510 - protein, 76 aa, Glycine max
  Clone ID: TF_5760190.pep
GGDPIHMLRAYMLEGLIARLESSGSIIYNALKCEQPTRTDLMTYMHILYQICPYWKSAYTSANAVIAEAVLNDSRI

SEQ ID NO: 32511 - protein, 383 aa, Glycine max
  Clone ID: TF_GmC4051_1.pep
MLAAPKQKMVNSGSEDLATHQLQQAITEQLFKAAELIDAGNLELAHGILARLNHQLSPIGKPFQRAAFYFKEALQLLLHPNANNSSFTFSPTGLLLKIGAYKSFSEISPVLQFANFTCNQALLEAVEGFDRIHIIDFDIGLGGQWSSFMQELALRNGSAPELKITAFVSPSHHDEIELSFSQESLKQYAGELHMSFELEILSLESLNSASWPQPLRDCEAVVVNMPIGSFSNYPSYLPLVLRFVKQLMPKIVVTLDRSCDRTDAPFPQHLIFALQSYSGLLESLDAVNVHPDVLQMIEKYYLQPSMEKLVLGRHGLQERALPWKNLLLSSGFSPLTFSNFTESQAECLVQRTPSKGFHVEKRQSSLVLCWQRKDLISVSTWRC

SEQ ID NO: 32512 - protein, 187 aa, Glycine max
  unsure (1)..(187): unsure at all Xaa locations
  Clone ID: TF_9564347.pep
FGTRRYLSDDRKGISCQSFSLRDAFLNLIKGLNPRIVLLVDEDCDLSASSLTSRITTCFNHLWIPFDALETFLPKDSCQRSEFESDIGQKIENIIGYEGHQRIERLESGVQMSQRMKNVGYLSVPFCDETVREVKGLLDEHASGWGMKREEGXLVLTWKGNSCVFATAXVPCEILRDHHIGMDASLS

SEQ ID NO: 32513 - protein, 523 aa, Glycine max
  unsure (1)..(523): unsure at all Xaa locations
  Clone ID: TF_GmC214_1.pep
MKRERQQLGSNAGTSSCGYSSGKSNLWEEEGGMDELLAVVGYKVRSSDMAEVAQKLERLEEAMGNVQDDLTDLSNDAVHYNPSDISNWLQTMLSNFDPLPSEEPEKDSASSDYDLKAIPGKAIYGAGSDALPNPKRVRADESRRAVVVVDSQENGIRLVHSLMACAEAVENNNLAVAEALVKQIGFLAVSQVGARXQKATYFAEALARRIYRVFPQQHSLSDSLQIHFYETCPYLKFAHFTANQAILEAFQGKNRVHVIDFGINQGMQWPALMQALALRNDGPPVFRLTGIGPPAADNSDHLQEVGWKLAQLAERIHVQFEYRGFVANSLADLDASMLDLREDESVAVNSVFEFHKLLARPGAVEKVLSVVRQIRPEILTVVEQEANHNGLSFVDRFTESLHYYSTLFDSLEGSPVNPNDKAMSEVYLGKQICNVVACEGMDRVERHETLNQWRNRFGSTGFSPVHLGSNAYKQASMLLSLFGGGDGYRVEENNGCLMLGWHTRPLIATSVWQLATKSVVAAH

SEQ ID NO: 32514 - protein, 595 aa, Glycine max
  Clone ID: TF_GmC3121_1.pep
MKRDHKDSCGGGGAAGGTVKGECSSMQSNGKAKMWEEEQQQQQQQQQQQQQQGMDELLAALGYKVRASDMADVAQKLEQLEMVMGCAQEDGISHLASDTVHYDPTDLYSWVQSMLTELNPEPNNNLDPSSFLIDNNNNIINSTAPVFNDDSEYDLRAIPGIAAYPSSLPQDNHLDEIETANNINKRLKPSPAESADSAASEPTRHVVLVDHQEAGVRLVHTLLACAEAVQQENLKLADALVKHVGILAASQAGAMRKVASYFAQALARRIYGIFPEETLDSSFSDVLHMHFYESCPYLKFAHFTANQAILEAFATAGRVHVIDFGLKQGMQWPALMQALALRPGGPPTFRLTGIGPPQPDNTDALQQVGWKLAQLAQIIGVQFEFRGFVCNSLADLDPNMLEIRPGEAVAVNSVFELHRMLARSGSVDKVLDTVKKINPQIVTIVEQEANHNGPGFLDRFTEALHYYSSLFDSLEGSSSSSTGLGSPSQDLLMSELYLGRQICNVVAYEGPDRVERHETLTQWRGRLDSAGFDPVHLGSNAFKQASMLLALFAGGDGYRVEENNGCLMLGWHTRPLIATSAWKLPSSSESSGLTQ

SEQ ID NO: 32515 - protein, 141 aa, Glycine max
  Clone ID: TF_4292932.pep
QVTELAGYVDLIPWHRFGYCASNNEIYKAITGFQRVHIVDFSITHCMQWPTFIDGLAKRPEGPPSLRITVPSCRPHVPPLVNISIHEVGLRLGNFAKFRDVPFEFNVIGNTEGPLTPAELSDESTSHFEAMLSLLNPTMLN

SEQ ID NO: 32516 - protein, 235 aa, Glycine max
  Clone ID: TF_GmC104019_1.pep
PHIRITGIDDSTSAYARGGGLHIVGRRLSKLAEHFKVPFEFHAAAISGFDVQLHNLGVRPGEALAVNFAFMLHHMPDESVSTQNHRDRLLRLVRSLSPKVVTLVEQESNTNTAAFFPRFLETLDYYTAMFESIDVTLSREHKERINVEQHCLARDLVNIIACEGVERVERHEVLGKWRSRFAMAGFTPYPLSSLVNGTIKKLLENYSDRYRLQERDGALYLGWMNRDLVASCAWK

SEQ ID NO: 32517 - protein, 201 aa, Glycine max
  Clone ID: TF_GmC7815_16.pep
CGVPFEFRSAAISGCEVVRGNIEVLPGEALAVSFPYVLHHMPDESVSTENHRDRLLRLVKRLSPKVVTIVEQESNTNTSPFFHRFVETLDYYTAMFESIDVACPRDDKKRISAEQHCVARDIVNMIACEGVERVERHELLGKWRSRLSMAGFKQCQLSSSVMVAIQNLLKEFSQNYRLEHRDGALYLGWMNRHMATSSAWR

SEQ ID NO: 32518 - protein, 174 aa, Glycine max
  Clone ID: TF_GmC191976_1.pep
FHEGVSHIGFVHYLSPSIVVLVKQEGSCRSLKTFLSRFHESLHYFAAMFDSLDDCLPLESTHRLRIEKQLLGKEIKSMLNYDMDDGVEYYCPKYDRMETWKGRMENHGFVGRKISSKCVIQAKLLLKMRTHYYPLQFEEEGGGGFRVSERDEGRVISLGWQNRFLLTVSAWQPV

SEQ ID NO: 32519 - protein, 107 aa, Glycine max
  unsure (1)..(107): unsure at all Xaa locations
  Clone ID: TF_15001148.pep
AVASFDQRNANDLLSQIRQHSSAFGDGLQRLAHYFANGLETRLAAGTPSYMPLEGTTSADMLKAYKLYVTSSPLQRLTXLFGNPDIVSLVENEGSVHIIDFGICYGF

SEQ ID NO: 32520 - protein, 548 aa, Glycine max
  Clone ID: TF_GmC170_3.pep
MQTSKKHPTSAGIHLYLQPAQDIDPYTHYQILQSNSCHDNSSSQGTTISFETSKEQYFTLESSPAINDLIGCDSPSYASVSSNRSPFSPQASHSDQHQSSDNTYGSPTSAHSRYDDDGYELKNKLRELEISLLGPDSDIVDSWHCSYKGGRHRASSPTAKHNWDQIVEMIPKLDLKEVLIRCAQAVADDDIETAVGFMNNVLAKMVSVGGDPIQRLGAYMLEGLRARLESSGSIIYKALKCEQPTSNDLMTYMHILYQICPYWKFAYTSANAVIGEAMLNESRIHIIDFQVAQGTQWLLLIQALASRPGGAPFIRVTGVDDSQSFHARGGGLHIVGKRLSDYAKSCGVPFEFHSAAMCGSELELENLVIQPGEALVVNFPFVLHHMPDESVSTENHRDRLLRLVKSLSPKVVTLVEQESNTNTSPFFQRFVETLSYYTAMFESIDVALPRDDKQRINAEQHCVARDIVNMVACEGDERLERHELLGKWRSRFSMAGFAPCPLSSSVTAAVRNMLNEFNENYRLQHRDGALYLGWKSRAMCTSSAWRCY

SEQ ID NO: 32521 - protein, 77 aa, Glycine max
  Clone ID: TF_700837816H1.pep
EMLDIRPGEALAVIFPLQLYHTADVSVHVSNPRVGLLSLVRLLSPKVTTFVEQESNTNTTPFFNRFIETLDYYLAIF

SEQ ID NO: 32522 - protein, 156 aa, Glycine max
  Clone ID: TF_GmC96540_1.pep
AVISSLRRLKPRIVTVVEEEADLDIGLEGFEFVKGFEECLRWFRVYFEALDESFPRTSNERLMLERAAGRAVVDLVACSPADSVERREKAARWARRMHGGGGFNTVAFSEEVCDDVRALLRRYREGWAMTQCSDAGIFLTWKEQPVVWASAWRALT

SEQ ID NO: 32523 - protein, 237 aa, Glycine max
  Clone ID: TF_GmC164_3.pep
MERLEGVISDTILYDPSNIGLGSLVDTLLSDLDQTMSLPSHYHLSSDLPDFATTVEEHSGIRLIHTLMTCADSLQRGHFSFAASLIQNMQGLLAHVNTNCGIGKVAACFIDALRRRISNKFPASSAYENDVLYHNYYEACPYLKFAHFTANQAILEAFNGHDCVHVIDFNLMQGLQWPALIQALALRPGGPPLLRLTGIGPPSAENRDNLREIGLRLAELARSVNVRFAFRGVAAWR

SEQ ID NO: 32524 - protein, 250 aa, Glycine max
  Clone ID: TF_GmC161879_1.pep
RRLALSGRQGGPPWLRISRAQLPQPGFRPAERVEETGRRLANYCKKFKVPFEYNCLAQKWETIKLADLKIDRNEVTVVSCFYRLKNLPDETVDVKSPRDAVLKLIRRINPNMFIHGVVNGTYNAPFFLTRFREALYHFSSLFDMFEANVPREDPERVMLENGLFGRDAINVIACEGAERVERPETYKQWQVRNQRAGFKQVRFDPLLVNDEKEMVKKEYQKDFVVAEDGKWVWLGWKGRILNAISAWTPA

SEQ ID NO: 32525 - protein, 144 aa, Glycine max
  unsure (1)..(144): unsure at all Xaa locations
  Clone ID: TF_LIB4200-008-Q1-N1-D10.pep
LHYYSTVFDSLEACPVEPDKALAEMYLQREICNVVAXEGPARVERHEPLAKWRERLEKAGFKPLHLGSNAYKQASMLLTLFSAEGYSVEENQGCLTLGWHSRPLIAASAWQAAPMQDRETLRFRAMSFKNRKNCLIIVVTSKQE

SEQ ID NO: 32526 - protein, 588 aa, Glycine max
  Clone ID: TF_GmC172_1.pep
MSSPRFPGGGASDFYGGAGGFPSQFTAVQPTMNNHSATTPRPLYRSQPSILLNPSSHIAQHQPSPLIGKRTLAEFQTHNLNSRNNNNDNPLLSNHLLRSVKPRTFQHTELSTFPSRRYGLPLLHHLRPNAVNAQQQPVTNSILANTNYLSPVHSRLTATHEPEKNLIALRLQELEKQLLEDNEDDAVSVITTTTSEWSHTIQNLITPQKPASSSPTSSTTSSNTSVESSSYKQSLTEAATAISEGKFDAATEILTRLLLNSDQRFVNCMVSALKSRMNHVECPPPVAELFGTEHAESTQLLFEYSLFFKVARMVANIAILESALTENGKLCVLDFDIGDGNQYVSLLHELSARRKGAPSAVKIVAVAENGADERLNSVGLLLGRHAEKLGIGFEFKVLIRRIAELTRESLDCDADEALAVNFAYKLYRMPDESVSTENPRDELLRRVKALAPRVVTLVEQEANANTAPFVARVSELCAYYGALFDSLESTMARENSARVRIEEGLSRKVGNSVACEGRNRVERCEVFGKWRARMSMAGFRLKPLSQRVAESIKARLGGAGNRVAVKVENGGICFGWMGRTLTVASAWC

SEQ ID NO: 32527 - protein, 439 aa, Glycine max
  Clone ID: TF_GmC997_1.pep
MDISPYTTPKKLSPHSNNHNNIIADEAAALLDHNNMHRSNHSHTSTSRSSDSSEPSEDGKWAPKLLRECAKAISERDSSKTHHHLWMLNELASPYGDCDQKLASYFLQALFCRATESGERCYKTLSSVAEKNHSFDSARRLILKFQEVSPWTTFGHVASNGALLEALEGEPKLHIIDLSSTLCTQWPTLLEALATRNDETPHLKLTVVAIAGSVMKEVGQRMEKFARLMGVPFEFNVISGLSQITKEGLGVQEDEAIAVNCVGALRRVQVEERENLIRVFKSLGPKVVTVVEEEADFCSSRGDFFKCFEECLKFYTLYFEMLKESFPPTSNERLMLERECSRSIVRVLACCGTGHEFEDDHGEFDCCERRERGIQWCERLRNAFSPSGFSDDVVDDVKALLKRYQSGWSLVVTQGDEHISGIYLTWKEEPVVWASAWKP

SEQ ID NO: 32528 - protein, 363 aa, Glycine max
  Clone ID: TF_GmC7815_18.pep
LAVSDDDVPTARGWIDNVLGKLVSVSGDPIQRLGAYLLEGLRARLESSGNLIYKSLKCEQPTSKELMSYMHILYQICPYWKFAYISANAVIQETMANESRIHIIDFQIAQGTQWHLLIQALAHRPGGPPSLRVTGVDDSQSTHARGGGLWIVGERLSDFARSCGVPFEFHSAAISGCEVVRGNIEIRAGEALAVNFPYVLHHMPDESVSTENHRDRLLRLVKSLSPKVVTFVEQESNTNTSPFFQRFVETLDYYTAMFESIDVACPRDDKKRISAEQHCVARDMVNMIACEGVERVERHELFGKWRSRLSMAGFKQCQLSSSVMVATQNLLKEFSQNYRLEHRDGALYLGWMNRHMATSSAWR

SEQ ID NO: 32529 - protein, 107 aa, Glycine max
  Clone ID: TF_GmC3121_15.pep
NQDLLMSKLYLGRQICNVVANEGTDRVERHETLSQWRGRLDSAGFDPVHLGSNAFKQASMLLALFAGGDGYRVEENNGCLMLGWHTRPLIATSAWKLPSPNDLHCKL

SEQ ID NO: 32530 - protein, 149 aa, Glycine max
  Clone ID: TF_GmC979_1.pep
NSAPVKNGKYTYPILLDADWGSGIVKDREALCLYAASYGNAARGTVKDREALCLYAASYGNAARFINHRCLDANLVEIPVEVEGPTHHYYHFAFFTSRKVAAQEELTWDYGINFDEHDDQPIELFQCRCSSKFCRNIKRLNRSMRSSSS

SEQ ID NO: 32531 - protein, 55 aa, Glycine max
  Clone ID: TF_uC-gmroLIB3258053g01a1.pep
SSLHVAFCALRHIPPMTELTYDYGLAQSDRAEGSMAAKGRKKCLCGSSKCRGSFG

SEQ ID NO: 32532 - protein, 348 aa, Glycine max
  unsure (1)..(348): unsure at all Xaa locations
  Clone ID: TF_GmC1246_1.pep
MPAMKKNPELTCIGSVFNMLGKELGEPVDFELPDSFNKSKPMQYTYIKRNIYLTKKVKRSRFDDDGIFCSCTPSPGSTSVCGRDCHCGMLLSSCSSGCKCGSSCLNKPIQNRPVKKMKLVKTEKCGSGIVADEDIKLGEFVIEYVGEVVKGVLXNFGHGILVMVECMIFSYEYINHLVVKSFSSLLITSWSRFFKDPSLPFSHIIFHTCGNXFIPLLSPMXQGEHLTYDYQFVQFGADQDCHCGAAECRRKLGVRPTKSKLSSDAALKLVAYQVYQNGGLQIGSSRVVDQPKCLHNCIGEVIRIKHLENERFGIIKRFDKYSRKHSIMFEDGCVEIYDMSKEDFELVR

SEQ ID NO: 32533 - protein, 114 aa, Glycine max
  unsure (1)..(114): unsure at all Xaa locations
  Clone ID: TF_18690744.pep
ACVPGDLNCSCIRRNEGDFPYTGNGILVSRKPLVHECGPTCQCFPNCKNRVSQTGLKHPMEVFRTKDRGWGLRSLDPIRAGTFICEYAGEVVDRGKVSQLVKEGNEYVFDXPVF

SEQ ID NO: 32534 - protein, 220 aa, Glycine max
  unsure (1)..(220): unsure at all Xaa locations
  Clone ID: TF_GmC270_2.pep
MLVKGCNSNVLCAFFVLQVVNYWAGKGISGFTVYKFRLRRLEGQPTLTXNQVYFTYGRVPQTLTKIRGLVCEDITEGQENMPIPAKLXGDAPPVPPGKGFTYCKFVKVAKNVKLPMNATGCECKGICNDPTTCACALRNGSDFPYVSRDGGRLVEAKDVVFECGPECGCGPGCVNRTSQRGLRYRLEVFRTAKKGWAVRSWDFIPSGAPVCEYTGLLARA

SEQ ID NO: 32535 - protein, 171 aa, Glycine max
  Clone ID: TF_jC-gmXLIB3563P049dd06a1.pep
SSSTSSRTGIILADLSTGVESIPVSLVNEVDNEKGPSFFTYFHSLRDPKPFSLAQSSYGCNCNKTCVPGDLSCSCIQRNEGDFPYTANGVLVSRKPLVHECGPLCKCFPNCKNRVSQTGLKHQMEVFKTKDRGWGLRSLDPIRAGTFICEYAGEVIDIAKVNKNRGYDDEY

SEQ ID NO: 32536 - protein, 158 aa, Glycine max
  Clone ID: TF_GmC5793_1.pep
LRTLEDLPKGAFVCEFVGEILSMKELHERNLKCTENGKYTCPVLLDANWDSGYVKDEEALCLDAASFGNTARFINHRCSDANLIEIPVEVEDPGHYYYHFAFFTSRKISAQEELTWDYGIDFDDHDHPVKLFQCRCGSKFCRNMKRYSRSLRYASIAG

SEQ ID NO: 32537 - protein, 131 aa, Glycine max
  unsure (1)..(131): unsure at all Xaa locations
  Clone ID: TF_9819698.pep
ELPKTVNSEINEIEPLSAARCRVFIRPSRKKDEVPIIHLXGGQTXHSLSAITQLNSNKDAQVFSSLKERLHHLQKTENQKVCLGKSGIHGWGLFARRDLEEGEMVVEYRGEQLRRSITDLREAQYRSEGXD

SEQ ID NO: 32538 - protein, 685 aa, Glycine max
  unsure (1)..(685): unsure at all Xaa locations
  Clone ID: TF_GmC67530_1.pep
APTRPYGCEKTTEGGLNKEVPNIVSEFVGGTSLEIQERYKTIKEKNIGRLDQPSQNSGEYESTIGICVEKTLSAALDSFDNLFCRRCLIFDCRLHGCSQPLIYHSEKQTVWSDPEGDRKPCSDQCYLQLKVVKNVTEDSTSGSDQNKRTTITEEADVILAPSIIEEPSNQSIVPFPTEVDCLGSLNLNVPISGTREKWKVPNQSDTALRDSSLPPDDSQHSYKKLKTISDDVVTANSDSSKNINFGACDESIHTITSGLLDKSVKDNSNKLIDSSSTCCSDEQDKSIGDGPKDPTNKTEFKKLSNSMEGKVDGMLRXSDWKPLEKELYLRGVEMFGRNSCLIARNLLSGLKTCMEISSYMHSGGVSMPHGSTVAPSSIMEEKGKFDAECTDQEMPSRSRLLRKRGKTRKFKYSWKSAGHPSIWKRIADGKNQSCKQYTPCGCQSMCGKECTCINGGTCCEKYCGCSKSCKNRLRGCHCAKSQCRSRQCPCFAAGRECDPDVCRNCWVSCGDGSLGEPPRRGEGQCGNMRLLLRQQQRILLAKSDVAGWGAFLKNPVNKNDYLGEYTGELISHREADKRGKIYDRANSSFLFDLNDQYVLDAYRKGDKLKFANHSSNPNCYAKVMLVAGDHRVGIFAKEHIDASEELFYDYRYGPDQAPPWARKPEGSKRDESTAPQGRAKKHQSH

SEQ ID NO: 32539 - protein, 73 aa, Glycine max
  Clone ID: TF_LIB4164-031-R1-N1-A11.pep
KGNIARLINHFCMPNCFARIVPLSDQENRIVFIAKTNVSAGEELTYNYSFDDERDEKKVVCPCKAPNCSGFMN

SEQ ID NO: 32540 - protein, 333 aa, Glycine max
  Clone ID: TF_GmC387_1.pep
RADSARDVFQYINCEDGKMSGPPGDVANSLMDGYSKGNNEVRRRSRFLRRRGRVRRLKYTWKSAAYHSIRKRIPQKGDQPCRQYNPCGCQTACGKQCPCLQNGTCCEKYCGRPKSCKNRFRGCHCAKSQCRSRQCPCFAADRECDPDVCRNCWVSCGDGTLGIPSQRGDNYECRNMKLLLKQQQRVLLGRSDVSGWGAFLKNSVGKHEYLGEYTGELISHREADKRGKIYDRENSSFLFNLNDQFVLDAYRKGDKLKFANHSPDPNCYAKVIMVAGDHRVGIFAKERICAGEELFYDYRYEPDRAPAWARKPEASGSKKEDGAPSSGRAKKLA

SEQ ID NO: 32541 - protein, 62 aa, Glycine max
  Clone ID: TF_GmC312266_1.pep
ANEENNQSYLHVAFFALRHIPPMTELTYDYGLAQSDHAEGSSAAKGRKKCLCGSSKCRGSFG

SEQ ID NO: 32542 - protein, 845 aa, Glycine max
  Clone ID: TF_GmC6450_1.pep
SKENRLLSERKHRNNETHGGLDNGDYASDRESRRRLSKLNKKYFNSESETSDDCDRSSVDGKSDSDTTTTDIESDQDVYSENGIGDSRGDVYFTPDDGLDFITDEREWGARMTKASLVPPVTRKYDVIDQYIIVADEEDVRRKMRVSLPDGYAEKLSVQKNGIDESDMELPEVKDYKPRKQLENEVVEQEVYGIDPYTHNLLLDSMPKELDWSLQEKHLFVEDKLLRMLNKQVNHFTGTGNTPMSYPLQPAIEEIERYAEEQCDVRTVRMCQGILKAIASRPDDKYVAYRKGLGVVCNKEEGFAEDDFVVEFLGEVYPVWKWFEKQDGIRSLQKDSKDPAPEFYNIYLERPKGDADGYDLVVVDAMHMANYASRICHSCRPNCEAKVTAVDGQYQIGIYSLREIQHGEEITFDYNSVTESKEEYEASVCLCGSQVCRGSYLNLTGEGAFEKVLKEWHGILDRHYLMLEACELNSVSEEDYNDLGRAGLGSCLLGGLPDWLVSYAARLVRFINFERTKLPEEILKHNLEEKRKYFSDIILEVERSDAEVQAEGVYNQRLQNLAVTLDKVRYVMRCIFGDPRKAPPPLEKLSPEATVSFLWKGEGSFVEELLQCITPHVEEGILNDLKFKIHAHDPSNSGDIQKELRKSLLWLRDEVRNLPCTYKCRHDAAADLIHIYAYTKYFFRIQDYQTITSPPVYISPLDLGPKYADKLGAGFQEYRKIYGENYCLGQLVFWHNQSNAEPDCTLARISRGCLSLPDISSFYAKAQKPSRHRVYGPRTVRSMLARMEKQPQKPWPKDRIWSFKNSPKFFGSPMLDAVINNSPLDREMVHWLKHRPAIFQAMWDQ

SEQ ID NO: 32543 - protein, 193 aa, Glycine max
  Clone ID: TF_GmC477_2.pep
MPALHLVRGKPLIFECGPFCSCPPHCRNRVAQKGLKYRLEVFRSKQTSWGVRSLDLIQAGSFICEFAGVVLTREQAQLLTMNGDSLIYPNRFSERWAEWGDLSQIYPDYVRPLYPSIPPLDFSLDVSTMRNVACYMSHSSTPNVLVQFVLHDHNNLMFPHLMLFAMENIPPMRELSLDYGVADEWTGKLSICN

SEQ ID NO: 32544 - protein, 282 aa, Glycine max
  Clone ID: TF_GmC27513_1.pep
MSAFDVSGVSRPRADVNLLQSETEGIDDEKIGFYGRCTLHIIEPRCLPIYDPLDEIGSQEEKEFTCARAEGYKGRRWDGFQNNQCQGGCLVPEEQLNAWIHINGQKLCSRGLPKFPDLDIEHDCRKEYARYKQAKGWKHLVVYKSRIHALGLYTSRFISRGEMVVEYIGEIVGLRVADKREKEYQSGRKLQYKTACYFFRIDKEHIIDATRKGGIARFVNHSCLPNCVAKVITVRHEKKVVFLAERDIFPGEEITYDYHFNHEDEGKIPCYCNSKNCRRYMN

SEQ ID NO: 32545 - protein, 294 aa, Glycine max
  Clone ID: TF_GmC121298_1.pep
FVNIAIQLVYLWKNSFSLILVAKETRYEPPPNPSGCARSEPYDYFGRRGRKEPEALAAASLKRLFVENQPYLVGGYSRHGSLNNLEPSGRGVCSKFFCSQQRLRTSRIDTSNSILSISEKYTYMRETFRKRLAFGKSRIHGFGIFAKHPYKGGDMVIEYTGELVRPPIADRREHFIYNSLVGAGTYMFRIDDERVIDATRAGSIAHLINHSCAPNCYSRVISVNGDEHIIIFAKRDIKQWEELTYDYRFFSIDERLACYCGFPKCRGIVNDTEAEERAATLYAPRSELIDWRGE

SEQ ID NO: 32546 - protein, 296 aa, Glycine max
  Clone ID: TF_GmC1138_1.pep
SSSTSSRTGIILADLSTGVESIPVSLVNEVDNGWGPSFVSVCQSPWAPQPFRCAQSASGCNCNKTCVPGDLSCSCIQRNEGDFPYTANGVLVSRKPLVHECGPLCKCSPNCKNRVSQTGLKHQMEVFKTKDRGWGLRSLDPIRAGTFICEYAGEVIDVAKVNKNRGYDDEYVFDTSRIYDTFKWNYEPSLLEEISSNVSSEDYDIPSPLIISSKKFGNVARYMNHSCSPNVFWQPVLYAENNQSFLHIAFFALRHIPPMTELTYDYGCSGHADGSSAPKGRKKCSCGSSKCRGSFG

SEQ ID NO: 32547 - protein, 499 aa, Glycine max
  unsure (1)..(499): unsure at all Xaa locations
  Clone ID: TF_GmC6450_2.pep
PKGDADGYDLVVVDAMHMANYASRICHSCRPNCEAKVTAVDGQYQIGIYSLREIQHGEEITFDYNSVTESKEEYEASVCLCGSQVCRGSYLNLTGEGAFQKVLKDSHGILDRHCLMLEACELNSVSEEDYNDLGRAGLGSCLLGGLPDWLVAYAARLVRFINFERTKLPEEILKHNLEEKRKYFSDIILEVERSDAEVQAEGVYNQRLQNLAVTLDKKLHXVRYVMRCIFGDPRKAPPPLEKLSPEATVSFLWKGEGSFVEELVQCITPHVEEGILNDLKFKIHAHDPSNSGDIQKELRKSLLWLRDEVRNLPCTYKCRHDAAADLIHIYAYTKYFFRIRNYQTITSPPVYISPLDLGPKYTNKLGAEFQEYRKIYGENYCLGQLIFWHNQSNADPDRSLARASRGCLSLPDTNSFYAKAQKPSRHCVYGPRTVRSMLARMEKLPQRSWPKDRIWSFKSSPKFFGSPMLDAVVNNSPLDREMVHWFKHRPAIFQAMWDR

SEQ ID NO: 32548 - protein, 155 aa, Glycine max
  Clone ID: TF_GmC1246_2.pep
RNQNPELTCIGSVFNMLGKELGEPVDFELPDSFNKSKPMQYTYIKRNIYLTKKVKRSRFDDDGIFCSCTPSPGSTSVCGRDCHCGMLLSSCSSGCKCGSSCLNKPFQNRPVKKMKLVKTEKCGSGIVADEDIKLGEFVIEYVGEVMIGQWIDCFC

SEQ ID NO: 32549 - protein, 198 aa, Glycine max
  Clone ID: TF_GmC91094_1.pep
GKKGYGLKAIENVAQGQFLIEYVGEVLDMQAYEARQREYALKGHRHFYFMTLNGSEGTDASAKGNLGRFINHSCDPNCRTEKWMVNGEICIGLFALRDIKKDEELTFDYNYVRVFGAAAKKCYCGSPNCRGYIGGGDPLNAELIVQSDSEEEFTEPVMLTKDGEIEDSVPTPEYSNNVDTQSAKHMLKDRDILDNSTT

SEQ ID NO: 32550 - protein, 134 aa, Glycine max
  Clone ID: TF_LIB4367-007-R1-K1-A4.pep
AFCEFLLWDMIYRGVQNFYMCEIRKDFTVDATFKGNTSRFLNHSCDPNCVLEKWQVDGETRVGVFAACSIEAGEPLTYDYRFVQFGPEVKCHCGAANCQGFLGTKKKIGKLDLYWGSKRMRTSKASCITLVTAV

SEQ ID NO: 32551 - protein, 98 aa, Glycine max
  unsure (1)..(98): unsure at all Xaa locations
  Clone ID: TF_LIB4203-002-R1-N1-B11.pep
DEAARRGKVYXKYMCSFLFNLNNDFVVDATRKGNKICFANHSVNPNCYAKVMMVNGDPRIGIFAKRAIQTGEELFFDYRYSQADALKYVGIEREMEIP

SEQ ID NO: 32552 - protein, 200 aa, Glycine max
  unsure (1)..(200): unsure at all Xaa locations
  Clone ID: TF_GmC138311_1.pep
MRGRFPYDENGRIILEEGYLVYECNHMCRCNKSCPNRVLQNGVRVKLEVFXTEKKGWAVRAGEAILRGAFVCGYIAEVLDVQEARDRRKRYGAEHCSYLYDIDARVNDMGRLAREQAQYVIDATKFGNVSRFINHSCSPNLVNHQVLVESMDCERAHIGFYASRDIALGEELTYDYQYELMPGEGSPCLCESLKCRGRLY

SEQ ID NO: 32553 - protein, 162 aa, Glycine max
  Clone ID: TF_GmC195940_1.pep
KETFVCEYVGEILPIMELYKRIMQDTGTKKHTYPVTLDADWGSEQGLKDEEALCLDATKNGNVGRFINHRCYDANLIDIPVEIESPDHHYYHLAFFTNRTVSANEELTWDYGIDFDDHDHPIKAFRCCCGSVFCCDKKQKGKGKIENQINVTRGMSELKQLE

SEQ ID NO: 32554 - protein, 215 aa, Glycine max
  unsure (1)..(215): unsure at all Xaa locations
  Clone ID: TF_GmC195137_1.pep
GAIVQAKPLVYECGPTCKCPSTCHNRVSQLGIKFQLEIFKTDTRGWGVRSLNSIPSGSFICEYIGELLEDKEAEQRTGNDEYLFDIGNNYXVEARGNSTLWDDLXTLTTLMPDAHTASCEVVKDGGFTIDAAQFGNLGRFINHSCSPNLIAQNVLYDHHDTRMPHIMFFAADNIPPLQELTYDYNYEIDQVRDSDGNIKKKYCYCGSVDCTGRMY

SEQ ID NO: 32555 - protein, 557 aa, Glycine max
  unsure (1)..(557): unsure at all Xaa locations
  Clone ID: TF_GmC270_1.pep
LKVNRTLRLWHLYCPHFLRVGAKRCGKAEAERKAAKKASLKPSKLKKGAPPEESKTTAKRPDLKAVSKMMENNEILYPEKRIGNIPGIEVGYQFYSRAEMVAVGFHSHWLNGIDYMGRSYAKAFCYELKIAEASHISGMYGEDLDNAXPNEYTGHGGHSLTGDKRQFRDQKLERGNRCLMXCXEGFVLWRVIRDQDSSSSYTGKVYTYDGLYKVVNYWAGKGISGFTVYKFRLRRLEGQPTLTTNQVYFTYGRVPQSLTEIQGLVCEDITGGQEDMPIPATNLVDDPPVPPTDFTYCKSLKVAKNVKLPMNATGCKCEGICNDPTSCACALRNGSDFPYVSRDGGRLIEAKDVVFECGPKCGCGPGCVNRTSQRGLRYRLEVFRTAKKGWAVRSWDFIPSGAPVCEYTGILARAEDMDSVLENNYIFEIDCLQTIKGLGGRERRSQDGEIPANLLDKYHDQCSESVPEFCIDAGSTGNIARFINHCCEPNLFVQCVLSTHDDLRLARIMLFAADNIPPLQELTYDYGYVLDSVLDSDGKIKQMPCYCGASVCRKRLF

SEQ ID NO: 32556 - protein, 707 aa, Glycine max
  unsure (1)..(707): unsure at all Xaa locations
  Clone ID: TF_GmC793_1.pep
MEHHFGQGTTPASESFDKARVLNVKPLRTLVPVFPSPSNPASSSTPQGGAPFVCVSPSGPFPSGVAPFYPFFISSESQRLSEQNAQTPSGQRVPAAPVSTAVPINSFRTPTGAANGDVGSSQKNTRSRGWVTEEDGYSNVEIEEIDADEGTGTGRSKRKSNKKTKARQSGGSVSVDVDPDAVAADILKSLNALVFDVLSQPEGSRDSVAYTLMIYEVMRRKLGQIEDSNRAANSGAKRPDLKAGAIMMNKGIRTNSKKRIGVVPGVEIGDIFFFRFELCLVGLHAPSMAGIDYIGKTSQEEEPLAVSIVSSGGYEDNVEDGDVLIYSGQGGVNRDKGASDQKLERGNLALEKSAHRGNEVRVIRGLRDPQHPTGKIYVYDGLYKIQNSWVEKAKSGFNVFKYNLVRLPEQPQAYMIWKSIQQWTEKSASRAGVILPDLTSGAENVPVCLVNDVDNEKGPAYFTYIPTLKNLRPTAPVESSTGCPCVGGCQSKNFNCPCIQKNGGYLPYSSALLLADLKSVIYECGPSCQCPSNCRNRVSQSSLKFRLEPFRSTNKGWGLRSWDSIRAGTFICEYAGEVIYIAKPKKLGGDNANYLIFDSTHIYLQLEVFPDDTDSSXKFPSPLYISAKNEGNVSRFRNHSCSPNVLWRPVIRENKNESDLHIAFYAIRHIPPMMELTYDYGTVLPLKVGQRKKKCLCGSVKCKGYFC

SEQ ID NO: 32557 - protein, 378 aa, Glycine max
  Clone ID: TF_GmC88400_1.pep
MIKGKKDTTSKGKSSVSVNSSSHNDQLSLKNKAGQKVLKFSGEVQNDVKDFVKSNVKKLSASTDNSVVMKKIVKSDGTVKEKVTSHCSREIQNATMKVSKSKRKHQMDGTASSHPTKVLKISNGGAYLGASKQVTVASRKSAKSKPLNLCPRSDGCARTSIDGWEWHKWSRSASPAYKARVRGLPCVQNKCIDSENNLSQLSNGKGLSARTNRVKLRNLLAAAEGADLLKVPQLKARKKHLRFQRSKIHDWGLLALEPIEAEDFGIEYIGELIRPRISDIRERQYEKMGIGSSYLFRLDDGYVVDATKRGGIARFVNHSCEPNCYTKVISVEGQKKIFIYAKRHIAAGEEITYNYKFPLEEKKIPCNCGSRKCRGSLN

SEQ ID NO: 32558 - protein, 347 aa, Glycine max
  unsure (1)..(347): unsure at all Xaa locations
  Clone ID: TF_GmC477_1.pep
REFGLIRLEGMKYEGSAAGSGKVYVYDGVYRIVDCWFDVGRSGFGVYKFKLWRIEGQAKMGSAILKEARNVRRSELDLNPTSXDVSNRKENVAVRLFNDIDANYDPLQYEYLVKTNFPQFVFHQSGRGTGCECADGCVEGCFCAMKNGGDFPYNQSGILLRGKPLVFECGPFCRCPPHCRNRVTQKGLKNRLEVFRSRETGWGVRSMDLIQAGAFICEYTGVVLTREQARLLTMNGDSLIYPNRFTDSWAEWGDVSLIDSNFVRPSYPSIPPLDFAMDVSRMRNVACYMSHSSTPNVLVQFVLYDHNNLMFPRLMLFAMESIPPMRELSLDYGVADEWTGKLSICNE

SEQ ID NO: 32559 - protein, 395 aa, Glycine max
  unsure (1)..(395): unsure at all Xaa locations
  Clone ID: TF_GmC276_2.pep
SWVCKACETPDIKRECCLCPVKGGALKPTDVDTLWVHVTCAWFRPEVSFASDEKMEPALGILSIPSNSFVKICVICKEIHGSCTQCCKCSTYFHAMCASRAGYRMELHCMEKNGKQTTKMVSYCAYHRAPNPDTVSIMQTPLGVISTKSLLQTKRKAGSRLISSKRIKVEDTSPAENTRHEPFSXARCRIYRRTNHTKKRAAGEAIAHHVRGHYHHPLDAIQSLNADRMVDKPPAFSSFRERLHHLQRTENERVCFGXRSGIHGWGLFARQNIQEGEMVLEYRGEQVRRSIADLREXRYRLEGKDCYLFKISEEVVVDATDKGNIARLINHSCMPNCYARIMSVGDDESRIVLIAKTDVSTGDELTYDYLFDPDEPDEFKVPCLCKASNCRKFMN

SEQ ID NO: 32560 - protein, 142 aa, Glycine max
  unsure (1)..(142): unsure at all Xaa locations
  Clone ID: TF_GmC230545_1.pep
MDPHTEELPQYIHINQNEFCIRRHKKQKEEDIAICECKYDADDPDNACGDSCLNVLTSTECTPGYCHCDILCKNQKFQKCEYAKTKLFKTEGRGWGLLADEDIKAGQFVIEYCGQGIXWKEAKRGCQAYENEGLKDAFIIFL

SEQ ID NO: 32561 - protein, 78 aa, Glycine max
  Clone ID: TF_17020590.pep
ARFINHSCDPNLFVQCVLNSHYGVKQARLVLFAGRNIRPKQELTYDYGYRLDSVVDADGKIKQLPCYCGEATCRKRLY

SEQ ID NO: 32562 - protein, 425 aa, Glycine max
  Clone ID: TF_GmC143160_1.pep
MDSSSQMLSAEDNKISPKTFDQKIIESSQTFMKDIKPKTSSQASHTMLSEVEKISNLPRVAAKDRKSYPENASSAVEKELVKPRTKKLKMQLASTNHIGLPDASDEKLCLKPLSTQDQDMESKDDVISACDRNTPAYNGNITIASSSRLGEVKISLNCDSALGQPNFSIPNLDIVMKFMDKKYIRSCNAVEPQFSMAKLLDDLCRIYLKLGYRKGSNSKRANLQQYVNQGERNPFRFISDITKGSEKVKISLIDETGSEDLPKFNYIPCNITYQSANVNISLARISDEGCCSDCSGNCLSSPLPCACAQETGGEFAYTPHGLLKEEFLTACVSMKNEPQDHHYVYCQECPLEKSKNEYMPERCKGHMVRKFIKECWRKCGCDMQCGNRIVQRGIACKLQVFSTREGKGWGLRTLEDYPKGTLYVI

SEQ ID NO: 32563 - protein, 102 aa, Glycine max
  unsure (1)..(102): unsure at all Xaa locations
  Clone ID: TF_LIB3049-034-Q1-E1-G9.pep
RGTYRCRIDDXRVIVATRAGSIAHLIKQSCARNCYSRVMSVNGYQHNTIFAMRDIKXWEELTYDDRIFSIDERRPCYCGFPKCLSILNDTDAEERAATLYAP

SEQ ID NO: 32564 - protein, 334 aa, Glycine max
  unsure (1)..(334): unsure at all Xaa locations
  Clone ID: TF_GmC78230_1.pep
IMLPRKKEIXIYANMTEHQKNLQDHLVNKTLGNYLKENMSSGLSVPAIMIRNLAIQLRKVCNHPDLLESAFDDSYLYPPLEEIVGQCGKFHLLDRLLQRLFSRNHKVLIFSQWTKVLDIMDYYFSEKGFAVCRIDGSVKLEERKQQIQDFNDVNSNCRVFLLSTRAGGLGINLTVADTCILYDSDWNPQMDLQAMDRCHRIGQTKPVHVYRLSTAQSIEGRMLKRAFSKLKLEHVVIEKGQFHQERTKPASMDEIEEDDVLALLRDEETAEDKKIHTDISDEDLEKLLDRSDLIVNDSNDDNFKAPVSAFPLKGPGWEVVIPTATGGMLSTLNC

SEQ ID NO: 32565 - protein, 247 aa, Glycine max
  Clone ID: TF_GmC636412_1.pep
TIKNKISLAELFDSNRGQLNEKRILNLMNIVIQLRKVCNHPELFERSEGSTYLYFGEIPNSLPPPPFGEMEDVYYSGGHNPISYEIPKLVYQEIIQSSETLSSAVGPVVSRESFHKHFNIFRPENVYRSVFSEDMYSKSGNFGFTHMMDLSPQEVTFLATGSFMERLLFSMMRWEQKFIDEAVDFLTETIDDDPECSYLEKEKVRAVTRMLLVPSRSETLVLQKKFQTGPSHAPFEALVVPHQDRVL

SEQ ID NO: 32566 - protein, 205 aa, Glycine max
  unsure (1)..(205): unsure at all Xaa locations
  Clone ID: TF_uC-gmroLIB3259P248f08b1.pep
QLLKETEKYLQKLGSKLQEAKTAAGRFGQDVDETGNVSFLENSETENVDESDQAKHYMESNEKYYKMAHSIKESIAEQPSSLLGGKLREYQMNGLRWLVSLYNNHLNGILADEMGLGKTVQVISLICYLMEAKNDRGPFLVVVPSSVLPGWDSEINFWAPXVHKXVYAGPPEERRRLFKERIVHQKFNVLLTTYEYLMNKHDRPK

SEQ ID NO: 32567 - protein, 53 aa, Glycine max
  unsure (1)..(53): unsure at all Xaa locations
  Clone ID: TF_700978727H1.pep
XASXVVWXLPFXXALXAXRXRLSXCQKPLXEXXXKATTVPSXHSAXVFLXXAG

SEQ ID NO: 32568 - protein, 258 aa, Glycine max
  Clone ID: TF_LIB4164-006-Q1-K1-F3.pep
PEFPRSTHASDWPVIPYTDVHLEFVRRVTIDHVETYTVLLSGIFDGPDEGVTGLLHLASLKFVTLRPVLGARLSEEISSLRIRVEVLKSAFDACESLLDSSRQLWKKSMVNVMSWLRPEIMTSEVRYGFGTCMKMEVDPQIEMADDTCKARKHARFDPAGFCEAIKPSKSEPMLKDDIPELLPKLRPYQRRAAFWMVEREKAVEESRGERERNLFHSPLCIPVDFLDTSSQISQMFFNPFSGSISLWGLGKTVELLAC

SEQ ID NO: 32569 - protein, 139 aa, Glycine max
  unsure (1)..(139): unsure at all Xaa locations
  Clone ID: TF_uC-gmflminsoy021g09b1.pep
HASAHASADAWEECSVCTHSSVRHFCWWNKYVATPIQSYGNGDAGKRAMILLKHKVLKNIVLRRTKIGRAADLALPPRIVSLRRDCLDIKEQDYYESLYNESQAQFNTYIEANTLMNNYAXHIFDLLTRLRQAVDHPYL

SEQ ID NO: 32570 - protein, 420 aa, Glycine max
  Clone ID: TF_GmC1170_1.pep
LIVLSQNGGSNRGGFNIVSSSAKSSIHLDGLFNIISYDLVPKLQNMLMTCNFKVVIADESHFLKNAQAKRTTASLPVIKKAQYALLLSGTPALSRPIELFKQLEALYPDVYRNVHEYGNRYCKGGFFGVYQGASNHEELHNLIKATVMIRRLKKDVLSQLPVKRRQQVFLDLAGKDMKQINALFRELEMVKAKIKAAKSQEEAESLKFAQKNLINKIYTDSAEAKIPSVLDYVGTVIEAGCKFLIFAHHQPMIDSIHEFLLKKKVGCIRIDGSTPAASRQQLVTDFQEKDSIKAAVLSIKAGGVGLTLTAASTVIFSELSWTPGDLIQAEDRAHRIGQVSSVNIYYLLANDTVDDIIWDVVQNKLENLGQMLDGHENALEVSASLPVNSPSKQKTLDQFVRRCDNTDGLEYEPNPKRPRN

SEQ ID NO: 32571 - protein, 47 aa, Glycine max
  Clone ID: TF_7795170.pep
IESTYERALIGTPLQNHVGELFSLIRFLLFTPYSYYLCMDCDCLIFD

SEQ ID NO: 32572 - protein, 133 aa, Glycine max
  Clone ID: TF_GmC157_5.pep
SKQAKKKKREVTKGKTKKSDSKISKSSNTKKEEEMWMDEEDLDAPVRSDRSILHAVKWQRIILDEAHYIKSRHCNTAKAVLALESTYKWALSGTPLQNRVGELYSLIRFLQITPYSYYLCKDCDCRILDHSTK

SEQ ID NO: 32573 - protein, 493 aa, Glycine max
  unsure (1)..(493): unsure at all Xaa locations
  Clone ID: TF_GmC1248_1.pep
CSLRAKRRWCLSGTPIQNTIDDLYSYFRFLKYDPYAVYKSFYNTIKVPISKSTIQGYKKLQAVLRAIMLRRTKGTLLDGKPIINLPPKTIELSKVDFSIEERAFYTKLESDSRLQFKAYAAAGTVSQNYANILLXLLRLRQACDHPLLVKDFDSDPVGKDSVEMAKNLPRDMLINLFNCLEATFAICLVCNDPPEEPVITMCGHVFCYQCVSEYLTGDDNMYPSVNCKELIGDDLVFSKATLRSCISDDGGSLSSANSHLCDYSLVQQRDYTSSKIKAVLEVLQSNCKLKISSSDLLNSSGGCRDSPSSDNLYVEDCDSDVRVTKHTIKYSESTTEGPIKAIVFSQWTSMLDLVETSLRQFSIQYRRLDGRMTLGARDKAVKDFNTEPEIAVMLMSLKAGNLGLNMVAACHVILLDLWWNPTTEDQAIDRAHRIGQTRPVTVTRITIKDTVEDRILALQEDKRKMVASAFGEDHAGGTGTRLTVDDLKYLFMV

SEQ ID NO: 32574 - protein, 218 aa, Glycine max
  unsure (1)..(218): unsure at all Xaa locations
  Clone ID: TF_GmC154492_1.pep
GSLEEFQEEFKDINQEEQISRLHKMLAPHLLRRVKKDVMKELPPKKELILRIELSSKQKEYYKAILTRNYQILTRRGGAQISLINVVMELRKLCCHPYMLEGVEPDIDDAKEAFKQLLESSGKLQLLDKMMVKLREQGHRVLIYSQFQHMLDLLEDYCAYKNWQYERIDGKVGGAERQVRIDRFNAKNSSRFCFLLSTRAXGGLEINLATADTAIIYD

SEQ ID NO: 32575 - protein, 802 aa, Glycine max
  unsure (1)..(802): unsure at all Xaa locations
  Clone ID: TF_GmC1755_1.pep
GARGTNEKPVTMSIESVNDPQTLINNIQVVRSVAPVLNEELKPKLLTLLPCIFKCVQHSHVAVRLAASRCITSMAQSMTVKVMGAVVENAIPMLEDASSVYARQGAGMLISFLVQGLGVELVPYAPLLVVPLLRCMSDCDQSVRQSVTHSFAALVPLLPLARGLPQPIGLGEGVSRNAEDLQFLEQLLDNSHIEDYKLCTELKVTLRRYQQEGINWLAFLKRFKLHGILCDDMGLGKTLQASAIVASDIAEHRTSIGNEDLLPSLIICPSTLVGHWAFEIEKYIDVSVISSLQYVGSAQERMLLRDHFCKHNVIITSYDVVRKDIDFLGQLLWNHCILDEGHIIKNAKSKVTLAVKQLKAQHRLILSGTPIQNNIMDLWSLFDFLMPGFLGTERQFQATYGKPLLAARDPKCSARDAEAGALAMEALHKQVMPFLLRRTKDEVLSDLPEKIIQDRYCDLSPVQFKLYEQFSGSRAKQEMSSVVTTNESAAAEGSSSSTKASSHVFQALQYLLKLCSHPLLVIGEKIPESLSTILSELFPAGSDVISELHKLYHSPKLVALHEILEECGIGVDNSGSEGAVNVGQHRVLIFAQHKAFLDIIERDLFHTHMKSVTYLRLDGSVEPEKRFEIVKAFNSDPIIDVLLLTTHVGGLGLNLTSADTLVFVEHDWKLMRDHQXMDRAHRLGQKKVVNVHRLIMRGTLEEKVMSLQRFKVSVANAVINSENASMKTMNTDQLLDLFASAETSKKGASVVKSPENNSDGDAKLVGSGKGLKSILGGLEELWDQSQYTEEYNLSLFLARLNG

SEQ ID NO: 32576 - protein, 88 aa, Glycine max
  Clone ID: TF_701101675H1.pep
LQDISQPKTEYDLPAGVLSVSLLRHQKIALAWMLQKETKSLHCLGGILADDQGLGKTISMISLILAQRTLQSKSKIDDTCSHKTEALN

SEQ ID NO: 32577 - protein, 147 aa, Glycine max
  unsure (1)..(147): unsure at all Xaa locations
  Clone ID: TF_GmC129655_1.pep
ACRRCVDLGLRTVLIVTPVNVLHNWRQEFIKWRPSELKPLRVFMLEDLSRDIRAQLLAKWRSKGGVFLIGYAAFRNLSFGKHVKDLHMAIXICHALHDGTDILVCDEAHMIKNTNDDVTXALKQVKCQRRIALTGSPIQNNLMEYHC

SEQ ID NO: 32578 - protein, 142 aa, Glycine max
  Clone ID: TF_7589119.pep
RVLHNYASILELLLRLRQCCDHPFLVMSRGDTQEFADLNKLAKRFLRGTYTASEGEVKDTPSRAYVQEVVEELRKGEQGECPICLEVFEDAVLTPCAHRLCRECLLSSWRNATSGLCPVCRKTISRLDLITAPTENRFQVDI

SEQ ID NO: 32579 - protein, 177 aa, Glycine max
  Clone ID: TF_GmC423697_1.pep
LKKQQKEFQHYTQSPVFLSEGTLHPYQLEGLNFLRFSWSKQTHVILADEMGLGKTIQSIAFLASLFKEGVSPHLVVAPLSTLRNWEREFATWAPHMNVLMYVGSAQARSVIREYEFYFPKKQKKIKKKKSGHLISESKQDRIKFDVLLTSYEMINFDTASLKPIKWECMIVDEGHRL

SEQ ID NO: 32580 - protein, 135 aa, Glycine max
  unsure (1)..(135): unsure at all Xaa locations
  Clone ID: TF_GmC131581_1.pep
MTIALILSXPGRGNSENNDVENGDDNFITNKRKNANTLHKFEGGTLIVCPMALLSQWKDELETHSKEGSISIFVHYGGARTTDPWMISGHDVVLTTYGVLQAAYKNDGENSIYNKVKWYRVVLDEAHNIKAHRNQ

SEQ ID NO: 32581 - protein, 172 aa, Glycine max
  Clone ID: TF_GmC2542_21.pep
AREAAMAVQGKMVDSQRKKSKASLRKLEKQPEWLKGGELRDYQLEGLNFLVNSWRNDTNVILADEMGLGKTVQSVSMLGFLQNAQQIHGPFLVVVPLSTLSNWAKEFRKWLPDMNIIIYVGTRASREVCQQYEFYNEKKPGKPIKFNALLTTYEVVLKDKAVLSKIKWNYLM

SEQ ID NO: 32582 - protein, 389 aa, Glycine max
  unsure (1)..(389): unsure at all Xaa locations
  Clone ID: TF_GmC189298_1.pep
GKHKVENELPEKIERLIRCEASSYQKLLMKRVEENLGAIGNSKARSVHNSVMELRNICNHPYLIQFHAKEVDNFIPKHYLPPIIRLCGKLEMXDRLLPKLKATDHRVLFFSTMTRLLDVMEEYLTSKQYRYLRLDGHTSGGDRGALIELFNQPGSPYFIFLLSIRAGGVGVNLQAADTVILFDTDWNPQVDLQAQARAHRIGQKRDVLVLRFETVQTVEEQVRASAEHKLGVANQSITAGFFDNNTSAEDRREYLESLLRECKKEEVAPVLDDDALNDLLARSETELDIFEAVDKERKEDELATWKKLVLGQAADGSDSDIPPLPARLVTDEDLKQFYEAMKISDVPKAEVESSGVKRKGGYIGGLDTQHYGRGKRAREVRSYEEQWTE

SEQ ID NO: 32583 - protein, 558 aa, Glycine max
  unsure (1)..(558): unsure at all Xaa locations
  Clone ID: TF_GmC300_1.pep
EDSGFKPLLKPYQLVGVNFLLLLYRKGIGGAILADEMGLGKTVQAITYLTLLKHLHNDSGPHLIVCPASVLENWERELKRWCPSFSVLQYHGAGRAAYCKELNSLSKAGLPPPFNVLLVCYSLFERHSAQQKDDRKILKRWRWSCVKKAGIRXLLFSSPWRRXNLMSVRENDGRGLMLQXIELKMRSXEKQFKLESLHSYIFNLEDVDLKKLQNAEDGDLCGRMKSILGPFILRRLKSDVMQQLVPKIQQVEYVIMEKQQETAYKEAIEEYRAVSQARMEKCSNLNSKSVLEVLPRRQINNYFVQFRKIANHPLLIRRIYNDEDVIRFARKLEKTTEGGFECTLDRVIEELKNYNDFCIHRLLLHYGVNDRKGILPDKHVMLSAKCRALAELLPSLKEGGHRALIFSQWTSMLDILEWTLDVIGLTYKRLDGSTQVAERQTIVDTFNNDTSIFACLLSTRAGGQGLNLTGADTVVIHDMDFNPQIDRQAEDRCHRIGQTKPVTIYRLVTKGTVDENVYEIAKRKLVLDAAVLESMEEINEGDMPEKTMGEILSAILLS

SEQ ID NO: 32584 - protein, 529 aa, Glycine max
  unsure (1)..(529): unsure at all Xaa locations
  Clone ID: TF_GmC300_2.pep
DVLPRRSSDSLGPYGARKGLGKTVQAITYLTLLKHLHNDSGPHLIVCPASVLENWERELKRWCPSFSVLQYHGAGRAAYCKELNSLSKAGLPPPFNVLLVCYSLFERHSAQQKDDRKILKRWRWSCVIMDEAHALKDKNSFRWKNLMSVARNANQRLMLTGTPLQNDLHELWSLLEFMLPDIFASEDVDLKKLLNAEDRDLIGRMKSILGPFILRRLKSDVMQQLVPKIQQVEYVIMEKQQETAYKEAIEEYRAVSQARMEKCSNLNSKSVLEVLPRRQINNYFVQFRKIANHPLLIRRIYNDEDVIRFARKLHPIGAFGFECTLDRVIEELKNYNDFCIHRRWHDYMLRLSYSMDNXALAELLPSLKEGGHRALIFSQWTSMLDILEWTLDVIGLTYKRLDGSTQVAERQTIVDTFNNDTSIFACLLSTRAGGQGLNLTGADTVVIHDMDFNPQIDRQAEDRCHRIGQTKPVTIYRLVTKGTVDENVYEIAKRKLVLDAAVLESMEEINEGDMPEKTMGEILSAILLS

SEQ ID NO: 32585 - protein, 113 aa, Glycine max
  Clone ID: TF_GmC128210_1.pep
MCQDLSSRNPNQNMNLLVPAKGRPSAGTLIVCPTSVLRQWAEELHNKVTCKAKLSVLVYHGSNRTKDPYELAKYDVVLTTYSIVSMEVPKQPFVDKDDEEKGTYDDHAISSKK

SEQ ID NO: 32586 - protein, 191 aa, Glycine max
  Clone ID: TF_7685168.pep
ASADDEDALVDSSDVMPDEEVDPEEAELKKEALKAAQEAVSKQRMLTSAFDTECLRLRQAGETDSLPPDVAGASNIDLQTPSTMPVASTVRTPELFKGVLKEYQLKGLQWLVNCYEQGLNGILADEMGLGKTIHAMAFLAHLAEEENIWGPFLVVAPASVLNNWNEELERFWPALKRLPYWGGLSDRTGLW

SEQ ID NO: 32587 - protein, 206 aa, Glycine max
  Clone ID: TF_LIB4167-054-R1-K1-B3.pep
RKAKKAVAAMLTRSKESEKTEDMNMTEEERVEKEQKELMPLLTGGKLKNYQLKGVKWLISLWQNGLNGILADQMGLGKTIQTIGFLSHLKAKGLDGPYMIIAPLSTLSNWVNEISRFAPSLPAVIYHGDKKQRDDIRRKHMPTRTIGPQFPIVITSYEIALNDAKRYFRSYNWKYLVVDEGHRLKNSQCKLVKALKFINVENKLLF

SEQ ID NO: 32588 - protein, 832 aa, Glycine max
  unsure (1)..(832): unsure at all Xaa locations
  Clone ID: TF_GmC795_1.pep
RHRATRAEKLRFQSLNADVQEAYMRMVKESNNERLTLLLEETTXLLVNLGVADQAYXQIKTMLXMELYEDSESNFPESAGLKNVISKESPLEEDVDLIDSDRNGGDTSDLLEGQRQYNSAIHSIQEKVSEQPSILQGGELRPYQLEGLQWMLSLFNNNLNGILADEMGLGKTIQTISLIAYLMEHKGVTGPHLIVAPKAVLPNWINEFSTWAPSITTILYDGRLDERKAMKEELSGEGKFNVLITHYDLIMRDKAFLKKIHWLYLIVDEGHRLKNHECALARTLDSGYHIQRRLLLTGTPIQNSLQELWSLLNFLLPNIFNSVQNFEDWFNAPFADRVDVSLTDEEQLLIIRRLHQVIRPFILRRKKDEVEKFLPSKSQVILKCDLSAWQKVYYQQVTDVGRVGLDNGSGKSKSLQNLTMQLRKCCNHPYLFVGDYDIHKHKEEIFRASGKFELLDRLLPKLRRAGHRVLLFSQMTRLMDILEIYLRLNDFKFLRLDGSTKTEERGSLLRKFNAPDSAYFMFLLSTRAGGLGLNLQTADTVIIFDSDWNPQMDQQAEDRAHRIGQKKEVRVFVLVSVGSIEEVILERAKQKMGIDAKVIQAGLFNTTSTAQDRREMLQEIMRRGTSSLGTDVPSEREINRLAARSDEEFWLFEKMDEERRQKENYRSRLMEEHELPDWVYSPLNKDDKVKIFDSGSVTGKRKRNEVVYADTLSDLQWMKAVENGQDISKLSVKGKRRDHLPVDNHAQASDDMGTEERLFRSEDTFDVTPASKRLKPEEINSQKHENEDVSVGGLNEHIFSWNTRRKKRSGYLGQGSFSDSRGQNSNGRANWN

SEQ ID NO: 32589 - protein, 147 aa, Glycine max
  Clone ID: TF_GmC78074_1.pep
ARKGARVGTSTKLREYELQYILQDNGVLLTTYDIVRNNSKSLQGNNYFDDEDNEEGATWDYMILDEGHLIKNPSTQRAKSLLEIPSAHRIIISGTPLQNNLKELWALFNFCCPELLGDHKWFKERFENPILRGNDKHASDREKRVGS

SEQ ID NO: 32590 - protein, 89 aa, Glycine max
  Clone ID: TF_uC-gmrominsoy142a11b1.pep
LFVRDNLDPLVKRAVAAASAVPDLQDRYHKIPSYIESKLLPFQREGVRFILQHGGRVLLADEMGLGKTLQAIHCLILNHFHTSTVHYDA

SEQ ID NO: 32591 - protein, 207 aa, Glycine max
  unsure (1)..(207): unsure at all Xaa locations
  Clone ID: TF_LIB4280-051-Q1-K1-E4.pep
PWSLNLLQGSASPEKPVSQENDNVWVLIPELKAKLHAHQKKAFEFLWQNIAGSMDPGLMEAASKRRGGCVVSHTPGAGKTFLIIAFLVSYLKLFPGKRPLVLAPKTTLYTWYKEFIKWDIPIPVYLIHGRRTYRVFKQKSSIVIPGVPKPTDDVKHVXDCLEKIQXWHSHPSVLIMGYTSFLTLMREDSXFAHRKYMAXKVLRESPW

SEQ ID NO: 32592 - protein, 1236 aa, Glycine max
  Clone ID: TF_GmC143184_2.pep
MMHRKSHLRQRKHPFHACPFEAYLSRSWRAVELIKFESGTTTLYFVDNHHMTIKKGSFSDVRVRSRKATLSDCSFLRTGIDICVLSASQGNDNSDESSANHVWLDAKINSIQRKPHNPECSCQYYVNFYVNQGSLGTELRTLRKEVKVVGINEIAILQKLERNTCQHKYYRWESSEDCSKVPHTKLLGKFISDLSWLVVASAIRKVSFCARSVENNIVYQILGSDATTSSLYMDSEISVVNFKVNEDGMQMPVIHLVDLFETDTNTSGDKHDSHYDEVPSSYGFEGLRRSKRRNIQPERYSDCGNVSEIKVGNVRTWPYKLNKRKDDDGGGEESLPLAQENSDNSQKVNELSSCREIIVYHGRNETLELKSGEANQTQLASVPLLQEGDSLALEHHHLNDNVTRRSDAYYSTPKLKRKRLVDLEADVDFDPGREGINSNKGVSEKRHGSSWYSRSRSHAAEHSYKDRSLNATAYKEMIDSYLKDVNRTPTTEEPPVMDQRKEIGNFGQKKEAEIPEREDEEQISEIDMLWREMEMALASSYLEETEGSNSANFAKTTEESNRTCPHDYRLSEEIGIYCYKCGFVKTEIKYITPPFIEMQRSVRHQEEKQCNGKDTKEKASKDDDFHLLSTHAPTDEHNSMEHDNVWKLIPQFREKLHDHQKKAFEFLWQNIGGSMEPKLMDAESKRRGGCVISHAPGAGKTFLIIAFLVSYLKLFPGKKPLILAPKGTLYTWCKEFNKWEISMPVYLIHGRGGTQKDTEQNSIVLPGFPNPNKYVKHVLDCLQKIKLWQEKPSVLVMSYTAFLALMREGSEFAHRKYMAKALREGPGILILDEGHNPRSTKSRLRKGLMKLKTDLRILLSGTLFQNNFCEYFNTLCLARPKFISEVLDTLDPITRRKSKTVEKAGHLLESRARKLFLDKIAKKIDSGIGNERMQGLNMLRETTNGFVDVYESENFDSAPGLQIYTLLMNTTDKQREILPKLHTRVDECNGYPLELELLVTLGSIHPWLVKTTSCANKFFTADQLKQLDKYKYDMKAGSKVKFVLSLVFRVMQREKVLIFCHNLAPVKLLIELFEMFFKWKKDREILLLSGELDLFERGKVIDKFEEHGGASKVLLASITACAEGISLTAASRVIFLDSEWNPSKTKQAIARAFRPGQEKMVYVYQLLVTGTLEEDKYKRTTWKEWVSSMIFSEAFEENLSHSRAVNIEDDILREMVEEDKSKTIHMILKNEKASTN

SEQ ID NO: 32593 - protein, 484 aa, Glycine max
  unsure (1)..(484): unsure at all Xaa locations
  Clone ID: TF_GmC290_1.pep
RPSFRYSTSDGAHSCCDWLEAKRRWCLSGTPIQNAIDDLYSYFRFLRYDPYSDHASFCTRIKNPISRNPANGYRKLQAVLKTIMLRRTKGTLLDGEPIISLPPKYIELKKVDFSMEERDFYSKLEADSRAQFQEYADAGTVKQNYVNILLMLLRLRQACDHPLLVKRYNSNSLWRSSVEMAKKLPQEKQISLLKCLEVSLALCSICNDPPEDAVVSVCGHVFCNQCICEHLSGDDNQCPAANCKSQLSTSMVFSKATLNTCLSDHGCYISPIYGGTVAEETEPWSESKPYDSLKMKAALEVLRAIXRRSCTNPAVIEKIEVXASAFGEDGTGDRQTRLTVDDLKYLFMMXIXDVHIYRYNLHFLDWXFFDLGADVILSFFPVTXLTKQKQNISSKGLEVVTRLLYGSLKWNPQTEDQAIDRAHRIGQTRPVTVLRLTVRDTVEDRILALQQKKRMMVASAFGEDGTGDRQTRLTVDDLKYLFMM

SEQ ID NO: 32594 - protein, 212 aa, Glycine max
  unsure (1)..(212): unsure at all Xaa locations
  Clone ID: TF_GmC737624_1.pep
YGLYKNNHGGILGDDMGLGKTIQAIAFLAAVFAKEGHSTLNENHVEKRDPALIICPTSVIHNWESEFSKWSNFSVSIYHGANRNLIYDKLEANEVEILITSFDTYRIHGSSLLDINWNIVIIDEAHRLKNEKSKLYKACLEIKTLRRYGLTGTAMQNKIMELFNLFDWVAPGSLGTREHFREFYDEPLKHGPRSTASDRFXQIANKRKHHLG

SEQ ID NO: 32595 - protein, 1250 aa, Glycine max
  Clone ID: TF_GmC143184_1.pep
MEASVLLGNSYGVVARVAVAGLRGGVMGSAISPFEAYLSRSWRAVELIKFESGTTTLYFVDNHHMTIKKGSFSDVRVRSRKATLSDCSFLRTGIDICVLSASQGNDNSDESSANHVWLDAKINSIQRKPHNPECSCQYYVNFYVNQGSLGTELRTLRKEVKVVGINEIAILQKLERNTCQHKYYRWESSEDCSKVPHTKLLGKFISDLSWLVVASAIRKVSFCARSVENNIVYQILGSDATTSSLYMDSEISVVNFKVNEDGMQMPVIHLVDLFETDTNTSGDKHDSHYDEVPSSYGFEGLRRSKRRNIQPERYSDCGNVSEIKVGNVRTWPYKLNKRKDDDGGGEESLPLAQENSDNSQKVNELSSCREIIVYHGRNETLELKSGEANQTQLASVPLLQEGDSLALEHHHLNDNVTRRSDAYYSTPKLKRKRLVDLEADVDFDPGREGINSNKGVSEKRHGSSWYSRSRSHAAEHSYKDRSLNATAYKEMIDSYLKDVNRTPTTEEPPVMDQRKEIGNFGQKKEAEIPEREDEEQISEIDMLWREMEMALASSYLEETEGSNSANFAKTTEESNRTCPHDYRLSEEIGIYCYKCGFVKTEIKYITPPFIEMQRSVRHQEEKQCNGKDTKEKASKDDDFHLLSTHAPTDEHNSMEHDNVWKLIPQFREKLHDHQKKAFEFLWQNIGGSMEPKLMDAESKRRGGCVISHAPGAGKTFLIIAFLVSYLKLFPGKKPLILAPKGTLYTWCKEFNKWEISMPVYLIHGRGGTQKDTEQNSIVLPGFPNPNKDVKHVLDCLQKIKLWQEKPSVLVMSYTAFLALMREGSEFAHRKYMAKALREGPGILILDEGHNPRSTKSRLRKGLMKLKTDLRILLSGTLFQNNFCEYFNTLCLARPKFISEVLDTLDPITRRKSKTVEKAGHLLESRARKLFLDKIAKKIDSGIGNERMQGLNMLRETTNGFVDVYESENFDSAPGLQIYTLLMNTTDKQREILPKLHTRVDECNGYPLELELLVTLGSIHPWLVKTTSCANKFFTADQLKQLDKYKYDMKAGSKVKFVLSLVFRVMQREKVLIFCHNLAPVKLLIELFEMFFKWKKDREILLLSGELDLFERGKVIDKFEEHGGASKVLLASITACAEGISLTAASRVIFLDSEWNPSKTKQAIARAFRPGQEKMVYVYQLLVTGTLEEDKYKRTTWKEWVSSMIFSEAFEENLSHSRAVNIEDDILREMVEEDKSKTIHMILKNEKASTN

SEQ ID NO: 32596 - protein, 70 aa, Glycine max
  unsure (1)..(70): unsure at all Xaa locations
  Clone ID: TF_701010777H1.pep
QDLSQPKSEVSPPEGLLXVPLLRHXXIALSWMVQKETSSLYCSGGILADDQGLGKTVSTIALILKRPPFT

SEQ ID NO: 32597 - protein, 549 aa, Glycine max
  unsure (1)..(549): unsure at all Xaa locations
  Clone ID: TF_GmC27_1.pep
YDDHAVSSKKRKCPPSSKSGKKGLDSAMLEAVARPLAKVAWFRVVLDEAQSIKNHRTQVARACWGLRAKRRWCLSGTPIQNAIDDLYSYFRFLRYDPYAVYTSFCSTIKIPISRSPSKGYRKLQAVLKTIMLRRTKATLLDGEPIISLPPKSVELKKVEFSPEERDFYSRLEADSRAQFQEYADAGTVKQNYVNILLMLLRLRQACDHHLLVKRDNSKSLSKSSFEAPQNNSSKIKSGLEMXFSWCLNHNVVLPKTILNILLFEMVLMAFVVSVLVMXNEAIEFSQGTNMKDILSTPSVFSKVTLNSSFSDQAGDNLPDYSGCEVEESEFFSQAQPCYSSKIKAALEVLQSLSKPQCFASQNNSVQSTSGESTDGLGIKMCFEERSSNNSVGVGEKAIVFSQWTRMLDILEACLKNSSIQYRRLDGTMSVTARDKAVKDFNTLPEVSVMIMSLKAASLGLNMVAACHVLMLDLWWNPTTEDQAIDRAHRIGQTRPVTVLRLTVRDTVEDRILALQQKKRKMVASAFGEDGTGGCQSRLTVDDLKYLFMM

SEQ ID NO: 32598 - protein, 152 aa, Glycine max
  Clone ID: TF_GmC358725_1.pep
SARVQNPIENGQHTNSTLIDVKIMNQRSHILYEQLKGFVQRMDMNVVKKDLPPKTVFVITVKLSPLQRKLYKRFLDVHGFTTQVHPEMLRKRCFFAGYQALARIWNHPGILQLTKEVKDYVKHEDAVENFLVDDSYSDENSDYNVLAGGKSS

SEQ ID NO: 32599 - protein, 152 aa, Glycine max
  Clone ID: TF_GmC122791_1.pep
GEYVCQMCSELIQATESPIASGATLIICPAPILPQWHDEIIRHTHQGSLKTCIYEGVRDTSFSNTSLMDIGDLASADIVLTTYDVLKEDLSHDSDRHEGDRHFLRFQKRFAPKSAIFLLCQYIFISYVGYFTYTFLDEFEIHRSFHSSSFHF

SEQ ID NO: 32600 - protein, 200 aa, Glycine max
  unsure (1)..(200): unsure at all Xaa locations
  Clone ID: TF_LIB4167-057-R1-K1-E8.pep
MSTKLISIMCVVWYFVCFGFLVCLTIPLPSPSLFCRALLHFLDPDKFRSKDEFVQNYKNLSSFNENELANLHMELRPHILRRVIKDVEKLLPPKIERILRVEMAPLQKQYYKWILERNFHNLNKGVRGNQVSLLNIVVELKKCCNHPFLFESADHGYGGDSXSSDNSKLERNGFSSGKLGILDKLLVKLHETKHXGFDFL

SEQ ID NO: 32601 - protein, 659 aa, Glycine max
  Clone ID: TF_GmC291_1.pep
LEIDADMNNRGKGRLKYLLQQTELFAHFAKGDQSSSQKKSRGRGRHASNFTEEEEDEEYLKGEEDGLANTRLVTQPSCIQGKMRDYQLAGLNWLIRLYENGINGILAGEMGLGKTLQTISLLGYLHEFRGIKGPHMVVAPKSTLGNWMNEIRRFCPVLRAIKFLGNPDERRHIRDELLVAGKFDVCVTSFEMAIKEKSALRRFSWRYIIIDEAHRIKNENSLLSKTMRLYSTNYRLLITGTPLQNNLHELWSLLNFLLPEIFSSAETFDEWFQISGENDQQEVVQQLHKVLRPFLLRRLKSDVEKGLPPKKETILKVGMSQMQKQYYRALLQKDLEVVNAGGERKRLLNIAMQLRKCCNHPYLFQGAEPGPPFTTGDHLIENAGKMVLLDKLLPKLKERDSRVLIFSQMTRLLDILEDYLMFRGYQYCRIDGNTGGDDRDASIDAFNKPGSEKFVFLLSTRAGGLGINLATADVVILYDSDWNPQVDLQAQDRAHRIGQKKEVQVFRFCTEYTIEEKVIERAYKKLALDALVIQQGRLAEQKTVNKDELLQMVRFGAEMVFSSKDSTITDEDIDRIIAKGEEATAELDAKMKKFTEDAIKFKMDDTAELYDFDDEKDENRFDIKKIVSENWIEPPKRERKRNYSESEYFKQTMRQVSTN

SEQ ID NO: 32602 - protein, 175 aa, Glycine max
  unsure (1)..(175): unsure at all Xaa locations
  Clone ID: TF_LIB4280-053-Q1-K1-G10.pep
PRVRYKAREAAMAVQGKMVDSQRKKSKASLRKLEEQPEWLKGGKLRDYQLEGLNFLVNSWRNDTNVILADEMGLGKTVQSVSMLGFLQNAQQIHGPFLVVVPLSTLSNWAKEFRKWLPDMXXIIYVGTSCVEKEFSTNEPSCLSGTSSTNSVEEPMALLSLIQVQESKDEFVQNY

SEQ ID NO: 32603 - protein, 370 aa, Glycine max
  unsure (1)..(370): unsure at all Xaa locations
  Clone ID: TF_GmC6683_1.pep
EQSESERDFYEALFERSKVQFDQYVAQGKVLHHYANILDLLMQLRRCCNHPFLVMCGSDTQKRADLSRLARKFFQTNTEFPDESNQNDPRQQAELNKLASRLLLKSASSLHSVQPHAYIAEVLENIQKGDIIECSICMESPEDPVFTPCAHKFCRECLFSCWGTSVGGKCPICRQLLQKDDLITYSSESPFKVDIKNNVTESSKVSKLFEFLQRILNTSSEKSIVFSQWTSFFDLLENPLRRRGIXFLRYDGKLTQKQREKVLDEFNETREKRVLLMSLKAGGVGLNLTAASNVFIMDPWWNPAVEEQAIMRIHRIGQNRRVVVRRFIVKDTVEDRLQQVQARKQRMISGTLTDDEVRTARIQDLKMLFT

SEQ ID NO: 32604 - protein, 103 aa, Glycine max
  Clone ID: TF_GmC972_1.pep
GIRHARLCHVPLIVEVVCCRLTPLQSNLYKHFIQSKNVKRAITEELKQSKILAYVTALKKLCNHPKVPINAAGLIRYNWCHPFFGKIIIHLMNMIIYSSLLQL

SEQ ID NO: 32605 - protein, 456 aa, Glycine max
  Clone ID: TF_GmC27_2.pep
IRLEISRSPSKGYRKLQAVLKTIMLRRTKGSLLDGEPIISLPPKSVELKKVEFSQEERDFYSKLEADSRAQFQEYADAGTVKQNYVNILLMLLRLRQACDHPLLVKRYNSNSLWKSSVEMAKKLPQEKRLCLLKCLEASLALCGICNDPPEDAVVSVCGHVFCNQCICEYLTGDDNQCPAPNCKTRLSTPSVFSKVTLNSSFSDQPCDNLPDYSGCEVEESEFCSQAQPYDSSKIKAALEVLQSLSKPQCFASQNNSVQSTSGESTDGLGSSSSADRMKSLNEIPESQNVLEERSSNNSVGVGEKAIVFSQWTRMLDILEACLKNSSIQYRRLDGTMSVTARDKAVKDFNTLPEVSVMIMSLKAASLGLNMVAACHVLMLDLWWNPTTEDQAIDRAHRIGQTRPVTVLRLTVRDTVEDRILALQVSVGCSFWWKQKKQGAENFVAWPLLTLDMKII

SEQ ID NO: 32606 - protein, 440 aa, Glycine max
  Clone ID: TF_GmC157_1.pep
PIIFVSLSILPNGASIGNPNFHLRPSMELRSRRRLSNPSVSGKEQPPGDDAVGEDETTTGKGSNNKDKGVAVISSNSDIVSGPDSDSDYEDEEFGVGSLPDLNQDPSSISFSSGEDYASDSSDGGKSLYKRGKALLSRGKRKSFNTEYGEPSDVVRVAEYKDDDAQFAIFQELSVPSVSKGTKRRKYSRKGRKGDSKSVLLWNAWEEEQEKWIDRHMLEDVDLDNHSEVMNETADIPSDLTMPLLRYQKEWLAWALKQESSASKGGILADEMGMGKTVQAIALVLAKREFELGCEPDQSIPCSSSLKPAIKGTLVICPVVAVTQWVSEVDRFTLKGSTKVLIYHGANRGRSGNRFADYDFVITTYSVVESEYRKHMLPPKERCPYCGKLFLPNKLMYHQIYFCGPDAVRTEKQSKQAKKKKREVTKGKTKRSYQGEDQEI

SEQ ID NO: 32607 - protein, 198 aa, Glycine max
  unsure (1)..(198): unsure at all Xaa locations
  Clone ID: TF_GmC400016_1.pep
ARGRMHSSKFSSTDSCDLLICDEAHRLKNDQTITNRAFAGESCQCPVXIVCKRRILLSGTPLQNDLEEFFAMVNFTNPGILGDIAHFRRYYEAPIICGREPAATAEEKKLGAEQSAELSVNVNRFILRRTNALLSNHLPPKIVEVVCCKLTPLQSELYKHFIQSKNVKRAITVELKQSKILVYITALKXLCNHSKLIL

SEQ ID NO: 32608 - protein, 229 aa, Glycine max
  unsure (1)..(229): unsure at all Xaa locations
  Clone ID: TF_LIB4281-011-R1-K1-C10.pep
PRPPKAVLPNWVNEFTTWAPSITAILYDGRLDERKAMKEELSGEGKFNVLLTHYDLIMRDKAFLKKIQWKYLIVDEGHRLKNHESALARTLDNGYRIQRRLLLTGTPIQNSLQELWSLLNFLLPNIFNSVQNFEDWFNAPFADRVDVSLTDEEQLLIIRRLHQVIRPFILRRKKDEVEKFLPGKSQVILKCDMSAWQXVYYQQVTDVGRVGLDNGSGKSKSLQNLTMQL

SEQ ID NO: 32609 - protein, 204 aa, Glycine max
  Clone ID: TF_GmC23376_1.pep
MEEEEDEVGWCSSDSGDGDGDDDIEERKSQNVDALLRGNLVVKRQSLLPRLLSVSQGAAVCRKPFKPPCSKSHASASAYNQDLTRKLSARKRFVPWGSSSPIPIPIPRSALDDSKFNVAVAVADVAEELKPSLPPGIDPLVLWHPQDSEDANANFTTITVDPVLVRYLRPHQREGVQFMFDCVSGLSTTPNIHGCILADDMGLG

SEQ ID NO: 32610 - protein, 159 aa, Glycine max
  Clone ID: TF_13791645.pep
MLPQNGIVKEESNMCEDKPSGYPMNLLKQAKGRPSAGTLIVCPTSVLRQWAEELRSKVNGQATLSVLVYHGSNRTKDPYEVAKHDVVLTTYSIVSMEVPKQPPADKDDEEKEIFEDHATPSRKRKSPSNSSKSGKKKLDGTNLETVARPLAKVSWVRVV

SEQ ID NO: 32611 - protein, 375 aa, Glycine max
  unsure (1)..(375): unsure at all Xaa locations
  Clone ID: TF_GmC1383_1.pep
LLITGTPLXSVEELWALLHFLDPDKFRSKDEFVQNYKNLSSFNENELANLHMELRPHILRRVIKDVEKSLPPKIERILRVEMSPLQKQYYKWILERNFHNLNKGVRGNQVSLLNIVVELKKCCNHPFLFESADHGYGGDSEVXDNSKLERIVFSSGKLVILDKLLVKLHETKHRVLIFSQMVRMLDILGEYMSLRGFQFQRLDGSTKAELRQQAMDHFNAPGSDDFCFLLSTRAGGLGINLATADTVIIFDSDWNPQNDLQAMSRAHRIGQQEVVNIYRFVTSKSVEEDILERAKKKMVLDHLVIQKLNAEGRLEKKEAKKGGSYFDKNELSAILRFGAEELFKEERNDEEXKQLLSMNIDEILGPPGTGGSCTV

SEQ ID NO: 32612 - protein, 369 aa, Glycine max
  Clone ID: TF_GmC47363_3.pep
RVRLVGLQWMLSLYNNKLNGILADEMGLGKTVQVMALIAYLMEFKGNYGPHLIIVPNAVMVNWKSELHTWLPSVSCIFYAGGKDYRSKLYSQEIMAMKFNVLVTTYEFIMYDRARLSKIDWKYIIIDEAQRMKDRDSVLARDLDRYRCQRRLLLTGTPLQNDLKELWSLLNLLLPEVFDNKKAFNDWFSKPFQKEGPTQNTEDDWLETEKKVIIIHRLHQILEPFMLRRRVEDVEGSLPPKVSIVLRCKMSAVQSAIYDWVKSTGTLRLDPEGENSKIQKNPHYQAKEYKTLNNRCMELRKTCNHPSLNYPLLGELSTNSIVKSCGKLWILDRILIKLQRTGHRVLLFSTMTKLLDLLEDYLRLRQNVN

SEQ ID NO: 32613 - protein, 137 aa, Glycine max
  unsure (1)..(137): unsure at all Xaa locations
  Clone ID: TF_uC-gmflminsoy047c04b1.pep
AREREGEEFERALGLLTLAPKRIGNKINRNAILCTRRSRLLKKAYELSVLCDXAELAPIISLQSQESSYDFRSGSSMLNTRERCQKCTYGPPEDNXVATKAALLLESSTQQEYLGLQALYRTLLLAYRHLMGEDLGP

SEQ ID NO: 32614 - protein, 80 aa, Glycine max
  unsure (1)..(80): unsure at all Xaa locations
  Clone ID: TF_700984421H1.pep
YXFYLIIXNNTNXTIALYLIQTKYLXXXSYXXXXXXXXXXRAVSISLSXFXSXLXPSLRYLLNLXXLGQYSTXPRFVKXK

SEQ ID NO: 32615 - protein, 101 aa, Glycine max
  unsure (1)..(101): unsure at all Xaa locations
  Clone ID: TF_jC-gmXLIB3563P040ca04a1.pep
TQVPFWRAGNHSHFDLESHPIITSPLHPEDHARSIFLEKRDGELGSGKIAIHTIENSTNRRDTYSMRTNVILENAXGVTVLCDAHLHAYHRLPSLERGRTT

SEQ ID NO: 32616 - protein, 183 aa, Glycine max
  Clone ID: TF_GmC73666_1.pep
PRVRGRVGSENVPNLSDVTKKTKGRQKIEMKTIANKCSLQVTFSKHRTGVFKKASELATLCGVDLAVIMFSPNNHVYSFGSPNVDSVIQRYTTEGPPPLFTQDLNEAPCTMDEGELQAHLNCLSNQIDAEKQRVEDLNHLLMAAKDHIWWDVPIESMSNAQLEKYHKMLKEIKLKHMRHTHGE

SEQ ID NO: 32617 - protein, 268 aa, Glycine max
  Clone ID: TF_GmC1806_1.pep
MASPASNPQSAETKKSRGRQRVDIKKMSNEANLQVTFSKRRSGLFKKASELCTLCGAEVALVVFSPGQKVFSFGHPSVDGVIERYLTGVAPPEADNMNYIDVHRMAKVVDLNAQLTHIKDQLEAERKRAKELGGIQKEAETHLWWARPVADITDINNLLKLKKAFQQLKQDVSGLAGMALFQSVANGNPGHQFFAGASSSAVPNVVLQSQPLPVAQVFPPAVPQMMFPPPIFENYMVNPNGFDDMGMGGGGFGGAGPSSAGGGGGGFF

SEQ ID NO: 32618 - protein, 95 aa, Glycine max
  unsure (1)..(95): unsure at all Xaa locations
  Clone ID: TF_LIB5118-045-A1-PF1-B9.pep
MVRGKTQIKRIENATSRQVTFSKRRNGLLKKAFELSVLCDAEVALIIFSSSGKLYEFASSSIQCSIERYRRHTKHDNPTTFRSVEQXMQHLKQEA

SEQ ID NO: 32619 - protein, 78 aa, Glycine max
  Clone ID: TF_GmC1804_1.pep
MTRTRIKIKKIDNITARQVTFSKRRRGLFKKAEELSVLCDAEVGLIVFSSTGKLFDYSSSRYVYGRRLVYYNTPLLSF

SEQ ID NO: 32620 - protein, 97 aa, Glycine max
  Clone ID: TF_GmC1920_1.pep
HIRGSQNHVGPAGADENPKWGKKEIVSKCTKNAEPCKVAVSSQPLWSFEVKRFPFSQPYLVWCLPSHLQPSNCYSSQNTSSNFSFSWACLCSERARN

SEQ ID NO: 32621 - protein, 54 aa, Glycine max
  unsure (1)..(54): unsure at all Xaa locations
  Clone ID: TF_LIB3108-017-Q1-K1-D12.pep
MVKEKIHIKKIDNASARHVTLLXRRRGLFKISEEPSFLCDADDALNIFFTTGKL

SEQ ID NO: 32622 - protein, 112 aa, Glycine max
  unsure (1)..(112): unsure at all Xaa locations
  Clone ID: TF_GmC134_4.pep
MEDPNQAPQASSQKKMGRGKIEIKRIENTTNRQVTFCKRRNGLLKKAYELSVLCDAEVALVVFSTXGRLYEYANNSVRATIERYKKANAAASNAESVSEANTQFYQQESSKL

SEQ ID NO: 32623 - protein, 61 aa, Glycine max
  Clone ID: TF_GmC7683_1.pep
MGRGKIAIRRIDNSTSRQVTFSKRRNGLLKKARELSILCDAEVGLMVFSSTGKLYDYASTR

SEQ ID NO: 32624 - protein, 110 aa, Glycine max
  Clone ID: TF_GmC138_3.pep
MGRGRVQLKRIENKINRQVTFSKRRAGLLKKAHEISVLCDAEVALIVFSHKGKLFEYATDSCMEKILERYERYAYAERQLVANDSESQVCYLFHNILAERHLHKYRHENV

SEQ ID NO: 32625 - protein, 54 aa, Glycine max
  Clone ID: TF_19052527.pep
APGKMHILMIENSTYRQVTYSILPNGLFNNANELTDLCDANGAMIMLSRTGKLQ

SEQ ID NO: 32626 - protein, 112 aa, Glycine max
  Clone ID: TF_GmC182_3.pep
MGRGRVELKRIENKINRQVTFAKRRNGLLKKAYELSVLCDAEVALIIFSNRGKLYEFCSSSRYAVCVDPFFSVSSLCEILKITFSLLTYEIYLLHYFIFYFFGAFLWICLIC

SEQ ID NO: 32627 - protein, 76 aa, Glycine max
  Clone ID: TF_LIB3242-424-P2-J1-C3.pep
SSIVEDHESILGISKVAQLISFLQKPDLSLCEDHSPVDHVAKSLKLHSSPSHHSLSFFPLSFSRSEYVHTHTIKNV

SEQ ID NO: 32628 - protein, 90 aa, Glycine max
  Clone ID: TF_uC-gmrominsoy040a11b1.pep
MVRGKTQMKRIENATSRQVTFSKRRNGLLKKAFELSVLCDAEAALIIFSPRGKLYEFASSSMQESIERHRMHTKHVNPTTFRSVEQNMQH

SEQ ID NO: 32629 - protein, 117 aa, Glycine max
  Clone ID: TF_uC-gmroLIB3258052e05a1.pep
GRGKIVIRRIDNSTSRQVTFSKRRSGLLKKAKELAILCDAEVGVMIFSSTGKLYDFASSGMKSVIDRYNKSKEEPCQLGSSASEIKVVIIDILRQYMHGSLQSSHELLRRYIICIDH

SEQ ID NO: 32630 - protein, 302 aa, Glycine max
  Clone ID: TF_GmC1919_1.pep
MGRVKLPIKKIENTTNRQVTFSKRRNGLIKKAYELSVLCDVDVALIMFSPSGRATFFSGNKSIEEILERYVNLSEGEHGRMHNKEHIQKLLSKLKDEAGQICQAPSSMTSDSQIEDLRREIFTCKSQLEEMEKRLRIFEGDPSEITTLSEAEYREYVLRDTLKQVQLRKCVLEEYNSHATHSPQVHAAKTVDVNGFISRASKNPVDWFPQGDPLHVQTLNFANVYDTALVRDQQSHHCTVVDMLTPTSTLLHSANMDLNGQMNPRSSLDAGISNTLHPQFGQAIHTNSSSWQHLNPLGTYWS

SEQ ID NO: 32631 - protein, 239 aa, Glycine max
  Clone ID: TF_GmC742252_1.pep
MTRKKVKLAFIANDSARKATFKKRKKGLMKKVSELSTLCGIDACAIVYSPYDPQPEVWPSPMGVQRVLAKFRRMPELEQSKKMVNQESFLRQRIMKAKDQLKKQRKDNREKEMTQLMFQYLSAGKIMHNISMVDLNDLAWLIDQNLKDINRRIEVLTKNAQSQPQIAAPAVTDVAAKVEDKGQGSQHGHQGFDINMDLMQKQNWFMNLMNNGGGGGNEAMPIVGDVNQQNGFWPNPFFH

SEQ ID NO: 32632 - protein, 74 aa, Glycine max
  Clone ID: TF_GmC734_2.pep
FSKRRTGLRKKANEISVLCDAQVALIVFNAKGKLFEYSSESSLLQSQTEIVLGKVFKLCGRDYNFVAIFGIVEN

SEQ ID NO: 32633 - protein, 108 aa, Glycine max
  Clone ID: TF_GM459L07.C16.o13.fg.pep
MGKKKVEIKRIENKSTRQITFSKRRNGLMKKARELSILCDAKVALLIFSSTGKLYELCNGDRLKNSVHPDSVGVWTSIKNLHINCMVRVQVPPFHTLYHIQGSGRRVN

SEQ ID NO: 32634 - protein, 45 aa, Glycine max
  unsure (1)..(45): unsure at all Xaa locations
  Clone ID: TF_LIB3242-252-Q1-J1-E2.pep
MEDPNKAPEASFQNKMGXGKIEFKRIENTTNRQVTFCKRRNVLLK

SEQ ID NO: 32635 - protein, 43 aa, Glycine max
  unsure (1)..(43): unsure at all Xaa locations
  Clone ID: TF_700786334H1.pep
MAREKVQIKTIDNATARQVTFSKRRRGLFXTAEELSVLSDANA

SEQ ID NO: 32636 - protein, 190 aa, Glycine max
  Clone ID: TF_GmC401_1.pep
MARKKLNLTYITNDPKRKTTLKKRKNGLMKKMNEISTLCGIESCAIIYSPNDPQPEVWPSDSGVQRVLSRFMEMSEVKQSRKMLNQENLLRQMINKGQQQLTRQRNQNRKKEMTNLMFQYLTAGKIFGNPSLVDLNDLSWLIDQNLNEIEKKITMLQIQEVTPVIENGEQEHMHHVQGLESNMDTKQKKH

SEQ ID NO: 32637 - protein, 104 aa, Glycine max
  Clone ID: TF_LIB3242-181-Q1-J1-H8.pep
FDLCTQTDIKQAININVGMLKLDLNRIEYNIIRLVTFAYRRNGSLKKGYELSGFCDAEVALMIFSIRDKVYEHCSGHSKTHSNIIKSFVYGRFCVCPFGGFLQP

SEQ ID NO: 32638 - protein, 300 aa, Glycine max
  Clone ID: TF_GmC1003_1.pep
MGRARISLKHISNERSRKKTFMERRKVLIKKISEFSTLCGVEACLIVYDDGNGDIEPVTCPKDPVLAHSILQNYEFQKNQRPPKKFGIQDFVEDRKNIIEAEISKVHKEITNIKYPTSDPSFINMEEDQLRAFIALVDAKIRTCDHSLKNMHQSEANFMQNMAWGSASSSHPTPMEPLNNNGRVDVTNSIDQVYEAMQLVDAPFSYIPDMVQKSFNCLQNISQSQPILDVEDEMVGFSNRVDVSLDTTNQIADLLDWFDGPIIGWSDLVDWTSQPDESQNEQQGGGDLDGFQTECYNLNF

SEQ ID NO: 32639 - protein, 89 aa, Glycine max
  Clone ID: TF_LIB4391-011-R1-K1-G8.pep
MGRARISLKHISNERSRKKTFMERRKVLIKKISEFSTLCGVEACLIVYDDGNGDIEPVTCPKDPVLAHSILQNYEFQKNQRPSKKVGYS

SEQ ID NO: 32640 - protein, 77 aa, Glycine max
  Clone ID: TF_GmC1805_2.pep
MGRGKVVLERIQNKINRQVTFSKRRNGLLKKAFELSVLCDAEIALVIFSSRGKLFQYSSTEYFSSISHLFYHYNPRF

SEQ ID NO: 32641 - protein, 92 aa, Glycine max
  Clone ID: TF_LIB3242-724-P1-K1-D8.pep
HQITHIVQIHKLSTMEDPNQAQEGSSQKKMGRGKIEIKRIENTTNRQVTFCKRRNGLLKKAYELSVLCDAEVALVVFSTRGRLYEYANNSGR

SEQ ID NO: 32642 - protein, 165 aa, Glycine max
  unsure (1)..(165): unsure at all Xaa locations
  Clone ID: TF_jC-gmXLIB3563P038dh09a1.pep
EAGKDRAXARGKNQXKRXENTTNRQXXKXKRRKGXXKKANEXTXXRXAKVFIXXXSSXGKXHEXNSPXTXTKXGXDQXQXXXGXXXXNXQXEXXQENXKKXKDXXRXXXKEXRQRKGEXXNEXSXEEXKXXEEEXDKAAKXXXEXKXKGKTXQXDTQRKKXKNEK

SEQ ID NO: 32643 - protein, 100 aa, Glycine max
  unsure (1)..(100): unsure at all Xaa locations
  Clone ID: TF_6747007.pep
WLLFKFHDYNYXLKIKGCIDKDSGDLAGLRGSRKSIILGTQHRRDEHVNNPSNTPALCTIGHXTLRELRGGNGGRASREADLIVTEELVMITFETYVYEP

SEQ ID NO: 32644 - protein, 156 aa, Glycine max
  unsure (1)..(156): unsure at all Xaa locations
  Clone ID: TF_LIB5118-019-A1-PF1-B1.pep
SVPTLQILVSPLTLNCKMNLKSVALLALPVXRPPQSFAAAIMRIRESETTALIFASGLMICSGAKSXPQSKLALRDHARISPKLAFPPRCTEFXIQNIVGSCDVKFPILLEALAYSHAALLRYEPESTPSAHLMMPHNLITTSVRISLEAKLNQAH

SEQ ID NO: 32645 - protein, 200 aa, Glycine max
  Clone ID: TF_GmC1803_2.pep
MAEQALEGSQPVDLTKHPSGIVPTLQNIVSTVNLDCKLELKSIALQARNAEYNPKRFAAVIMRIREPKTTALIFASGKMVCTGAKSEQQSKLAARKYARIIQKLGFPAKFKDFKIQNIVGSCDVKFPIRLEGLAYSHSAFSSYEPELFPGLIYRMKQPKIVLLIFVSGKIVLTGAKVRDETYTAFENIYPVLTEFRKNQQ

SEQ ID NO: 32646 - protein, 273 aa, Glycine max
  Clone ID: TF_GmC1803_9.pep
MAEQALEGSQPVDLTKHPSGIVPTLQNIVSTVNLDCKLELKSIALQARNAEYNPKRFAAVIMRIREPKTTALIFASGKMVCTGAKSEQQSKLAARKYARIIQKLGFPAKFKDFKIQNIVGSCDVKFPIRLEGLAYSHSAFSSYEPELFPGLIYRMKQPKIVLLIFVSGKIVLTGAKVRDETYTAFENIYPVLTEFRKNQQWYGSGSFSIAIGYTCCNPWARNIMNQYHCLYYFFFFVQLSEYNCVRCRAEVFLIEMTKFFTQFLFWVIYLYKF

SEQ ID NO: 32647 - protein, 144 aa, Glycine max
  unsure (1)..(144): unsure at all Xaa locations
  Clone ID: TF_GmC1803_8.pep
MADQGLEGSQPVDLQKHPSGIVPTLQNIVSTVNLDCKLDLKTIALQARNAEYNPKRFAAVIMRIRDPKTTALIFASGSCTGANNNLAAVCPXSKAGFSMKQPKIVLLIFVSGKIVLTGAKVRDETYTAFENIYPVLTEFRKNQQ

SEQ ID NO: 32648 - protein, 190 aa, Glycine max
  Clone ID: TF_GmC1803_1.pep
MDRIIDRRLGCPSYSLNIVSTVNLDCKLDLKTIALQARNAEYNPKRFAAVIMRIRDPKTTALIFASGKMVCTGAKSEQQSKLAARKYARIIQKLGFPAKFKDFKIQNIVGSCDVKFPIRLEGLAYSHGAFSSYEPELFPGLIYRMKQPKIVLLIFVSGKIVLTGAKVRDETYTAFENIYPVLTEFRKNQQ

SEQ ID NO: 32649 - protein, 200 aa, Glycine max
  Clone ID: TF_GmC1803_3.pep
MADQGLEGSQPVDLQKHPSGIVPTLQNIVSTVNLDCKLDLKTIALQARNAEYNPKRFAAVIMRIRDPKTTALIFASGKMVCTGAKSEQQSKLAARKYARIIQKLGFPAKFKDFKIQNIVGSCDVKFPIRLEGLAYSHGAFSSYEPELFPGLIYRMKQPKIVLLIFVSGKIVLTGAKVRDETYTAFENIYPVLTEFRKNQQ

SEQ ID NO: 32650 - protein, 200 aa, Glycine max; identical to SEQ ID NO: 32649
  Clone ID: TF_GmC1803_6.pep

SEQ ID NO: 32651 - protein, 201 aa, Glycine max
  unsure (1)..(201): unsure at all Xaa locations
  Clone ID: TF_GmC1803_5.pep
MADQGLEGSQPVDLQKHPSGIVPTLQNIVSTVNLDCKLDLKTIALQARNAEYNPKXRFAAVIMRIRDPKTTALIFASGKMVCTGAKSEQQSKLAARKYARIIQKLGFPAKFKDFKIQNIVGSCDVKFPIRLEGLAYSHGAFSSYEPELFPGLIYRMKQPKIVLLIFVSGKIVLTGAKVRDETYTAFENIYPVLTEFRKNQQ

SEQ ID NO: 32652 - protein, 200 aa, Glycine max
  Clone ID: TF_GmC1803_4.pep
MAEQALEGSQPVDLTKHPSGIVPTLQNIVSTVNLDCKLELKSIALQARNAEYNPKRFAAVIMRIREPKTTALIFASGKMVCTGAKSEQQSKLAARKYARIIQKLGFPAKFKDFKIQNIVGSCDVKFPIRLEGLAYSHGAFSSYEPELFPGLIYRMKQPKIVLLIFVSGKIVLTGAKVRDETYTAFENIYPVLTEFRKNQQ

SEQ ID NO: 32653 - protein, 65 aa, Glycine max
  unsure (1)..(65): unsure at all Xaa locations
  Clone ID: TF_4292721.pep
DLHTIVECRGWRIRMPCICAVRIFHLTRXLDHKSYCYTIQLHFLLALPSIIVSTCTGTNPFISIA

SEQ ID NO: 32654 - protein, 326 aa, Glycine max
  Clone ID: TF_GmC2268_16.pep
DAIEGRFHFLFEGRFHFLLEAASFSLDELVDILNVPVALMIADSACSKSHRMVLPSNLWSISWVSWKIRATQALVYGIGLSEERHGQAAGRRLLGLVRGQPLCDDGQLFSAMVVRKPLGTGSLTKANFNWKITWASKLEKCYCIVVLPQNELEVKAEDTTYTIPCLLLLPNSTQVLCILSIPYSLYMQGPMFWAMMISEQKVAHLALKPLGRNNAIDGTCGVGTKEPQLIFASADSESYIVYLGSHSHGPNPSASDLESATNSHYKLLGSHLGKEWNASGPMHVDLLEGALQRQTSVELQTNLWSPWLSKDGSLVLSVQNHLVSSN

SEQ ID NO: 32655 - protein, 246 aa, Glycine max
  Clone ID: TF_GmC2268_8.pep
TAISRTLEGRFHFLFEGRFHFLLEAASFSLDELVDILNVPVALMIADSACSKSHRMVLPSNLWSISWVSWKIRATQALVYGIGLSEERHGQAAGRRLLGLVRGQPLCDDGQLFSAMVVRKPLGTELLTKANFNWKITWASKLEKCYCIVVLPQNELEVKAEDTTYTIPCLLLLPNSTQVLCILSIPYSLYMQGPMFWAMMISEQKVAHLALKPLGRNNAIDGTCGVGTKEPQLIFASADSEEIVDD

SEQ ID NO: 32656 - protein, 234 aa, Glycine max
  Clone ID: TF_GmC18388_2.pep
IFQLTRELGHKSDGETVRWLLEHAPPASVEATGTGTVPAIAVSVGGTLKIPTTSSNEKEAVADASNKKRKRPSNSEFVDININDSVSQSSGLAPVHVAHGLVPVWAVTNPSMVVPANAFWMTPNPPMGPANQQHQLWALSPSVFNVAARPISPLVTTNIPEAWPIMTACSNDSNSAVSTSTVGAKVATESSMAPSVSSSGTKSARTRLLRDFSLQIYDKQELQFLGRSGTHAQS

SEQ ID NO: 32657 - protein, 56 aa, Glycine max
  Clone ID: TF_LIB3093-012-Q1-K1-E3.pep
MVRGSGCDIVQVEGGHIVRSTRHKDRHIKVCTLKGPIDRRVRLSAHTAIQFYDVQD

SEQ ID NO: 32658 - protein, 239 aa, Glycine max
  Clone ID: TF_GmC539_1.pep
MGENKPAEVKDFQIVVAENKEESKKQQQQLAPKRSSNKDRHTKVEGRGRRIRMPALCAARIFQLTRELGHKSDGETIQWLLQQAEPSIIAATGTGTIPASALAAAGNSLSPQAASLSSSLHQHQQKIDELGGSGGSSSRASWQMVGGNLGRPHLGVGVATAAGLWPPHVSGFGFQTPPTTTTPTTTTSSSGPSNATLATESSNYLQKIAFPGFDLPTSATNMMGHMSPAKDDSQGSGGQ

SEQ ID NO: 32659 - protein, 370 aa, Glycine max
  Clone ID: TF_GmC616_1.pep
MFPSTNYTSSGSYPRFPSSSSSTSPYPSFTLLHPENSSSSNNTFLHDPLALTYIPSHYHAPIPETLANWAVADCAILNQDLGGALYGITKKPMKKATKKDRHSKIHTSQGLRDRRVRLSIEIARKFFDLQDMLGFDKASNTLDWLFTKSKKAIKELTRSKHSVESFEFSSSSEGEVVSTIQQQDLQQQHGINLENGKLKEPAAYCVKAKMKESREKARARAREKTSSKVLCNTSGEGKVQELKKKCPATENPQILNQLRSTLQPPHPQNVGGEVPRDDDFNVIEESIVIRRKLKHTLMSSNIHHQNAVIPKEASVNNSDYHSFPNLSPNWEANNGANGRSTFCAIASMNLSTGLQIFGKSWEECTNPHPS

SEQ ID NO: 32660 - protein, 358 aa, Glycine max
  unsure (1)..(358): unsure at all Xaa locations
  Clone ID: TF_GmC12923_1.pep
KLTGGASSPASSSSLAIPTANPKRSTKDRHTKVDGRGRRIRMPATCAARVFQLTRELGHKSDGETIEWLLQQAEPAIIAATGTGTIPANFSSLNVSLRSSGSTLSAPPSKSAPHTFHGALALAHHPYDEAXNTPLLLGFHPHHQPQQLLSADHIPESLPSGAGDSGDNYLRKRYREDLFKDDNINNNNTQSQNESGDGDGSSPKLPKQQSEAGSGLLRPSNLLPATAMWAVAPSPASGPPGSTIWMLPVTAGASSSASSETQMWPFPQSVSGFMPRFNLPVPGALEFQGARAGSLQLGSMSMPQQQHLGLAMSDSNLGMLAALNAYTRASLNVNSDHHQHQHQSQPSESGEDDPNSSQ

SEQ ID NO: 32661 - protein, 340 aa, Glycine max
  unsure (1)..(340): unsure at all Xaa locations
  Clone ID: TF_GmC361_1.pep
MELEADHQNGIRSRPNFPLQLLEKKDVDDVTEQPCSTTSVVTTAAATITSGNNDLHVAEQSKKPPPKRSSTKDRHTKVDGRGRRIRMPAACAARVFQLTRELGHKSDGETIEWLLQQAEPAVIAATGTGTIPANFTSLNISLRSSGSTMSAPSHYFRGNYFNPSTFSTSAAAASAAAVAQLRSRAEWDRNMSMVMEDSRRSMLENTSSISAILNFNPMGNVNVIQQAKQELREESAAAGGGGSLDSVASDSDGSLGRKRRPEQELSQMGSYLIQSSTGSLPSSHASNTAAFWMVAGHGNQAMSGGGGSDGSSDNPIWXFPLLGIAVCIEELCLPQVAFIS

SEQ ID NO: 32662 - protein, 424 aa, Glycine max
  Clone ID: TF_GmC361_2.pep
MELEADHQNGIRSRLNFPLQLLEKKDIDDVTEQPCSTTSVVTATTTAITTTTTSDNNDLHLAEQSKKPPPKRSSTKDRHTKVDGRGRRIRMPAACAARVFQLTRELGHKSDGETIEWLLQQAEPAVIAATGTGTIPANFTSLNISLRSSGSTMSAPSHYFRGNYFNPSTFSTSAAAAAAAQLRSRAEWDRSMSMVMEDSRRSMLENTSSISAILNFNPMGNVNVIQQAKQELREESGGGGGLESVASDSDGSLGRKRRPEQELSQMGSYLIQSSTGSLPASHASNTAAFWMVAGHGNQAMSGGGSGGGGNNGSSDNNPIWAIPSVGNSGVYRGAMSAPGGIHFMNFASPMNLMPGGQLGSGIVGGGGGGGGNGGAQLLSESNLGMLAALNAYRQIPANGVSEPPGSAGQHHGGDDGRDSTSQHS

SEQ ID NO: 32663 - protein, 276 aa, Glycine max
  unsure (1)..(276): unsure at all Xaa locations
  Clone ID: TF_GmC430_1.pep
DRVVQHPPAPYAPLLSLPSHVELRRHQHGPLSAQSQRRRDSTGNRGGRPSPSKKPPSKDXRHSKVDGRGRRISMPIICAARVFQLTRELGHKSDGQTIEWLLRQAEPSVIASPASFYSVSLGCNKRCSALFSCSAPRPQQLAPTPFILGKRIRTDEDSSKDEDGSVGPSLVGPYAPPGPGVVPAWPDFGQIWSFVAAAAAPEMVSVPQQQQQQASLFAHHHRQQQQLAIGEALAARVGNYLPGHLNLLASLSSGPGNSGRRDDEPSLIVTSLQRWR

SEQ ID NO: 32664 - protein, 296 aa, Glycine max
  Clone ID: TF_GmC909_1.pep
GFQSLQQFTSMISKIGLDSTNQARLLIGCSMQQNMKLMNFLHFLFVRLTSPLGNPSVDCCLEVSTSREGSGQNTLLWKPKSGEMVSDDKANWMNRSEGDDDNAHDHTIGKQGSNNNICHGGTLVLPNNLLPRPNHPSFLSLMNIMPSLGYQWEANYSAHDVNIGQWQNHGFLNQTDVHSINVVPFPSTLALSTGNDTTTTSQILVCPPHGATTQPYFPSSHHVAAMEMNARQINHYQMLSSSSHQNLLANSLNPSSQQLMSQSEKLPFSLGIRPKLFHSPNRSESHSQKDQDLPSK

SEQ ID NO: 32665 - protein, 201 aa, Glycine max
  unsure (1)..(201): unsure at all Xaa locations
  Clone ID: TF_GmC355_2.pep
KLEEENHNRGLTLDPNRNYHHHHLLHQQPHHQNLILNSRRHVTNQEDQESHPHQFHIQFQQQREQQSYTALDTELLNPLQPPKKRSCRPPLPPPPPSSLTLSEHARKMGEPQHPHQHHQQAAATPSRAAMRGGGGGEIVEVQGGHIVRSTGRKDRHSKVCTAKGPRDRRVRLAAHTAIQFYDVQDXLXGYDRPSKXAVDWL

SEQ ID NO: 32666 - protein, 240 aa, Glycine max
  Clone ID: TF_GmC430_2.pep
MSNSDGAINAVPPNDANNNTIVEYQQRTTTTTTAAAAALAVKKPPSKDRHSKVDGRGRRIRMPIICAARVFQLTRELGHKSDGQTIEWLLRQAEPSIIAATGSGTTPASFSTVSDHKPLLPPPTPFILGKRIRPDDDSAAKDDAVSLVAPPTPPALWALPPRPDFGQVWSFAAAPELVSVSPQNSMFHHHHQHHQQQQQQAAMGEASAARLGNYLPGHLNLLASLSGGHGNSGRRDDEPR

SEQ ID NO: 32667 - protein, 246 aa, Glycine max
  Clone ID: TF_GmC430_5.pep
MSNSDATTNGVSNGAIIDAQRQQALAVKKPPSKDRHSKVDGRGRRIRMPIICAARVFQLTRELGHKSDGQTIEWLLRQAEPSIIAATGSGTTPASFSSVSLSVRAAANSLSSPSSTSDHKPQLLSPTPFILGKRIRTDEDSSKDEAVSVGPSLVGPSTPPGLWALPARPDFGQIWSFAAAAAPEMVSVSQQQQASLFAHHHRQQQQQAIGEASAARVGNYLPGHLNLLASLSGGPGNSGRRDDEPR

SEQ ID NO: 32668 - protein, 337 aa, Glycine max
  unsure (1)..(337): unsure at all Xaa locations
  Clone ID: TF_GmC18388_1.pep
MDQDDDEAGTTNLSTSDADVAEKETTNNLNGVPKQNNAFEETTGFQVLPLKKEEPTYSDPDTEIVPVKLPKRSSTKDRHTKVEGRGRRIRIPATCAARIFQLTRELGHKSDGETVRWLLEHAEPAIIEATGTGTVPAIAVSVGGALKIPTTSSNSNEEAAAAAASSNKKRKRPSNSEFVDINININDAVSQSSGLAPVHVAHGLVPVWAVSNXSMVVPANAFWMTPNPPMGPANQQHQLWALSPSVFNVAARPISPLVTTNIPEAWPIMTACSNDSNSAVSTSTVGAKVATESSMAPSVSSSGTKSARTRLLRDFSLQIYDKQELQFLGRSGTHAQS

SEQ ID NO: 32669 - protein, 151 aa, Glycine max
  Clone ID: TF_GmC897_2.pep
AKNHTKHNRGGTTITKGMRTNVGDIVQVEGGHIVRSTGRKDRHSKVYTSKGPRDRRVRLSAHTAIEFYDVQDRLGYDRPSKAVDWLIKKAKTSIDKLAELPPWHPPTNHEEEEQNDAAGSSGVIAIEQQQQQQQQQQQQQQQQQQQQQHQQ

SEQ ID NO: 32670 - protein, 405 aa, Glycine max
  Clone ID: TF_GmC7250_7.pep
AIQFYDLQDRLGYDQPSKAVEWLIKSASDSISELPSLNNFPDTPKSDDHEKRANTDVAAGAVDGENYENENGNNNNQSQNMSLSKSGCSSTSETSKGSGLSLSRSDIRVKARERARERTTKEKEKEKNESHHHHSNVVVPHHRHHHHHNPVSQTASFTELLTGGIPKGCDDEEPNNMMMFNKEAAAASSGRQQWCSSSSAAAAAPMDYFLGPSSSRTTTTPPHNHHHHHHQYSSSGGFSLAQIQLGHSLPEAMNHNVSAFNNNVSGENQNHSSSDPHLQQQQHFSFIPDHLMSAVVTSSSHHQPSGSDYNLNFTMSSGLAGYNRGTLQSNSPSLLPHLQRFSPLDGSTVPFFIGAAPSAAVAAPAMENNTTTTNNHHHHQFSSGFDGSRLQLYYGHSDQKGKAKN

SEQ ID NO: 32671 - protein, 443 aa, Glycine max
  Clone ID: TF_GmC553_1.pep
LVEAPGLIRASASIKSNKLPFVRGLNNIKWSSLDPQRKRAFAATVEHAGTTSSSQGMVRGSGGEIVQVEGGHIVRSTGRKDRHSKVCTAKGSRDRRVRLSAHTAIQFYDVQDRLGYDRPSKAVDWLINKAKSSIDQLAHLPPWKPTLPSPAPPHLNDDHSDKPNPNPNPNPNPNPNPNHSPDAQILNQFDHDDGAGAGSSYLPMDNDAIRSFFPTTTSSLVQFQSYPPDLLSRTSSQDLRLSLQSLQDPILLHHNHNNNEHVLFAGTAFDNMVAWNNNSNNNHNNNNHNNNNNNNNNTASNDTCGGGGGGGGGGGGFVFNAPSTLPGPATVASPTVVFGHGYGQGQYFSQTARAARGNSPSVRAWIDAPSFVAAAADHRHHHYLSPAAAAAALVYQSAPSTAAFTAAPGGFSGFRVPARIQGEEEHDGGMSDKPSSASSDSRR

SEQ ID NO: 32672 - protein, 289 aa, Glycine max
  unsure (1)..(289): unsure at all Xaa locations
  Clone ID: TF_GmC63399_1.pep
TSTNHFHQSSWHYSSRIIRVSRASGGKDRHSKVMTXKGLRDRRVRLSVTTAIQFYDLQDRLGYDQPSKAVEWLIKAASEAISELPSLNNPFPDTPKQPSDEKRPTSGGGQQQQQQGFDDADGDTNYQQNQSQNLSLSKSACSSTSETSKGSGLSLSRSEIRVNRVKARERARERAAKEKEKEKEKESDFNIAHHHHHHNVNNMSHTASFTELLTGGIGSTVTVNPNTTTTTTTTATSPNGSSVHQIHEGHDHEANLFNKGSQQQQQQQHHHWSQTVTPMDYFSAGLLVG

SEQ ID NO: 32673 - protein, 345 aa, Glycine max
  unsure (1)..(345): unsure at all Xaa locations
  Clone ID: TF_GmC122255_1.pep
MGMKSTGGAIFQVQGGHIVRSTGRKDRHSKVYTAKGPXRDRRVRLSAHTAIEFYDARERSRPDRPSKAVDWLIKKAKNAIDKLAELPPWHPNPNTTAADAENNNNNNAGSSDMAIAEQSESSGYNFQLQRQLGEDHDNHHHSAFIPSPIDTDAIAFFPTTTATSSINFQTYPPDIISRTNNSTEDLGLSLHSFQDPGLIHHGQSQAGANQTPSNDQTLFSGSTQVGFEANYPRIVTWNSDASIDMNRTGFMVNSPSALLGQGGSAAYSQRGTLQSSFSPSLRPWSDIPMASSEHHHKSQQASIFGSRFLSDALPGFCIPARIQGEDEGHGVGNDRPSSASPNSHH

SEQ ID NO: 32674 - protein, 187 aa, Glycine max
  Clone ID: TF_jC-gmfl02220071b11a1.pep
LELLPTPSSEPSPKKPPPKRTSTKDRHTKVDGRGRRIRMPALCAARVFQLTRELGHKSDGETIEWLLQQAEPSVIAATGTGTIPANFTSLNISLRSSGSSMSVPSQLRSSYFHNSNFSLQPRRSLFLENTNTPSTTTTLLHFQSNNNNAIFQPKHELRESSSLDLSSENNNEEGYFGRIRRPLEQDL

SEQ ID NO: 32675 - protein, 223 aa, Glycine max
  Clone ID: TF_GmC125579_1.pep
MEANPTHDGDDTSETPPPPMVDPSPSPPPQMKEEVMDAEQGGDTSLPMTVVPAHLPVSKAAAKRPSKDRHTKVEGRGRRIRMPATCAARIFQLTRELGHKSDGETIRWLLEHAEPAIIEATGTGTIPAIAVSVGGTLKIPTSSAARPEGEVDTPKKRRRRASNSEFIDVNENQVSVSSGLAPIAQSAYGSGVGGGLVPLWHGNAAASGPFFMFPNASNPQYWA

SEQ ID NO: 32676 - protein, 395 aa, Glycine max
  unsure (1)..(395): unsure at all Xaa locations
  Clone ID: TF_GmC355_1.pep
MQEKWESYNTINNRQQQQQXPSRAAMRGVGGGEIVEVQGGHIVRSTGRKDRHSKVCTAKGPRDRRVRLAAHTAIQFYDVQDRLGYDRPSKAVDWLIKKAKAAIDQLAELPPWNPTATSMQPRQLPQEIVHCENKSLAMDDSMTAAFSSRGESNAFASHQQVEDNENANNISSSSGNKYNTGSGFLPASLDTDNIAETIKTFFPVEATSTSFQSYPPAPPDLGHQDLRLSLQSFQDPIMLHHQPHSHHQPVLFAGTAAAALDFDGGSGWSEHLHQHQQQNHHSEEQRLLYAGGNSGHGGGFVFNTPAPVQVPAFGQFFSQRGPLQSSNTPSIRAWIDPSVDHHHHHHHYLSQLIHQGSVAGGGGFSGFRIPARIQGEEEHDGVSDKPSSASSDSRH

SEQ ID NO: 32677 - protein, 384 aa, Glycine max
  Clone ID: TF_GmC4156_1.pep
MVPWNRILTITKWKDKTQHLATNNERHKIMIKSPKEADFPLKQEGHSQSITDPEKAKASASSVAQWPRLKDPRIVRVSRAFGGKDRHSKVFTIRGLRDRRVRLSVPTAIQLYDLQDRLGLSQPSKVVDWLLDAAKHEIDELPPLPVVPSVNNFTLGHPSAVTSNEATTSNSQPNEQLLNINRSIQWEGSNQNSTWKLKPKEVSREMISTDKPNWISRSEEDKQGSNNEGPSTRVIPNINLLPRANLNHPSFLGLLNTMPHGYQWEPSAGDVSHQLGNNGFANQTDMHSINVVPFPTSTLSLSTGNSQILLCPPGTAQPYFPSHVTMDMDPRQINHYQMLSSGSQNPLANYLNHSFSLAMMTHKPLHSPNSSKSPSHKDQDFPSN

SEQ ID NO: 32678 - protein, 294 aa, Glycine max
  Clone ID: TF_GmC909_2.pep
LYDLQDRLGLNQPSKVVDWLLNAAKHEIDELPPLPIPPGNFTLGYPSLVSCNEVSTSREGSGQNTLLWKPKPGEIMVSDHDKANWMNRREGDDDDDNNHNNSNGDKQGSNNNCHGGALVLPNNLLPTRPNHPSFLGLMNTMPSLGYQWEPNSSAADVNVQWQNHGFFNQTDVHSIDVVPFPSTLALSTGNSTSTTTTSQILVCPPPPGATTQPYFPSSHFATMEMNARQINHYQMLSSSSHQNLLANSLNHPSSQQLMSQSGKAPFSLRIRPKLFHSPNSSESHSQKDQDFPSK

SEQ ID NO: 32679 - protein, 336 aa, Glycine max
  Clone ID: TF_GmC956_1.pep
MADEASGDVDLRLGEPKGPKEEPETEEGSAIRVMPVAVHVPAGMSMSMSKALAQAQAQAQPQKRASTKDRHTKVEGRGRRIRMPATCAARIFQLTRELGHKSDGETIRWLLEHAEPAIIAATGTGTVPAIAMSVNGTLKIPTTSPSDQEPGEPPERKKRKRPANSAYVDINGAAVSVSAGLASSIINNNNQNAATTMTTTMAIPQHTAIPLPQGMVPVWAIPSNAVVPAAGAFFVVPQTASFQHQPQFFTIARPISEFVSSMVTPVVQLQPTSINSSTNTNSNASSTAPSSKSPARATVMAPTTTTTTTRQMLRDFSLEIYDKQELQFMSRASSKH

SEQ ID NO: 32680 - protein, 68 aa, Glycine max
  Clone ID: TF_22521769.pep
MEEECVHQQNVAGNKSNFPLQLLKKKDEGPPPSPPPSAAKAKRPPTKDRHTKVEGRGRRIRMPAACAA

SEQ ID NO: 32681 - protein, 114 aa, Glycine max
  Clone ID: TF_GmC3142_2.pep
MSSMKFCRRCNNVLYPTEDKEEKLLLYACRNCNHEEIADSNVVYRNKIHHSVQRRTRELENVAADPTLPRTKSVRCSQCNHGEAVFFKAPVKGEEGMALIFVCCNPTCGYRWRD

SEQ ID NO: 32682 - protein, 114 aa, Glycine max
  unsure (1)..(114): unsure at all Xaa locations
  Clone ID: TF_jC-gmst02400020f11a1.pep
MEFCPSCGNMLQYELPYMGRPSRFFCSACPYVCHIENRVEIKRKQRLVRKEIEPIFSEDDMTNAPSTEATCPFCGHGKAAFKEFQTRSADEPATLXYKCWNNDCKKQWREGDFN

SEQ ID NO: 32683 - protein, 368 aa, Glycine max
  Clone ID: TF_GmC38330_1.pep
MEKELVELYEAAKKAADAAISGDGKHEESRCIDALEQLKKFPVNYKILVNTQVGKHLKVLTKHPRLKIKAFAIDLIEIWKGIIIKETSKNKNGGSDSKVESANGEKSKAGKMQKSPSVKVEKGETVKVEKIDRNGTTKSSSENMKKVQNDVKNEKTDRSASVKVEKIAKEEKPVSGAKKMSSSSAAPPKLKTMIKSNDATRDKIREILHEALSKVTGEADEDLVDVVNNSDPIRVAVTVESVLFEKWGPSNGAQKVKYRSLMFNLKDSNNPDFRRKVLLGVIEPEQLINMSTAEMASEQRKQEYQKITEKALFECERGGPPKATTDQFKCGRCGQRKTTYYQMQTRSADEPMTTYVTCVVCNNRWKFC

SEQ ID NO: 32684 - protein, 111 aa, Glycine max
  Clone ID: TF_GmC158666_1.pep
MEFCPSCGNMLQYELPYMGRPSRFFCSACPYVCHIENRVEIKRKQRLVRKEIEPIFSEDDMTNAPSTEATCPFCGHGKAAFKEFQTRSADEPATLFYKCLNNDCKKQWREG

SEQ ID NO: 32685 - protein, 114 aa, Glycine max
  Clone ID: TF_GmC7695_2.pep
MSAMKFCRECNNILYPKEDREQKVLLFACRNCDHQEVADNFCVYRNEIQHPVGERTQVLQDVAADPTLPRTKSVRCTQCNHGEAVFFQATARGEEGMTLFFVCCNPNCGHRWRD

SEQ ID NO: 32686 - protein, 76 aa, Glycine max
  Clone ID: TF_GM310N10.C12.o20.fg.pep
MVVTQVQLDRAKDIRRELEMEIIEEHTVMEYSKVSKKCEKCGHGEATYYTRQMRSTDKGQTTFYACTGCGHPSQEN

SEQ ID NO: 32687 - protein, 114 aa, Glycine max
  Clone ID: TF_GmC7695_1.pep
MSAMKFCRECNNILYPKEDRDQKVLLFACRNCDHQEVADNFCVYRNEIHHSVGERTQVLQDVAADPTLPRTKSVRCSQCNHGEAVFFQATARGEEGMTLFFVCCNPNCGHRWRD

SEQ ID NO: 32688 - protein, 92 aa, Glycine max
  Clone ID: TF_GmC869826_1.pep
YNEAQAAACLYIACRQEGVPRTFKEVCAVSKVSKKEIGRCFKLIQKTMETNLDHITSADFMSRFCGNLSLPYPVQVAATRIAKKSVEHDLVV

SEQ ID NO: 32689 - protein, 178 aa, Glycine max
  Clone ID: TF_GmC615_4.pep
MSDAFCSDCKRQTEVVFDHSAGDTVCSECGLVPESHSIDETSEWRTFANESGDNDPNRVGGPSNPLLTDGGLSTVIAKPNGGGGGEFLSSSLGRWQNRGSNPDRALIQAFKTIATMSDRLGLVATIKDRANEIYKRVEDQKSSRGRNQDALLAACLYIACRQEDKPRTVKEICSVANG

SEQ ID NO: 32690 - protein, 487 aa, Glycine max
  Clone ID: TF_GmC1028_1.pep
MKCPYCSAAQGRCATTSSGRSITECTSCGRVVEERQSHPHHVFHVRAQDNPLCLVTSDLALPALNQNNEEEDPFEPTGFITAFSTWALEPSPLYLQSSLSFSGYLAELERTLESSSSSSSSSSSSSLSSTVVVDNLRAYMQIIDVASILGLDCDISDHAFQLFRDCCSATCLRNRSVESLATAALVQAIREAQEPRTLQEISIAANVPQKEIGKYIKILGEALQLSQPINSNSISVHMPRFCTLLQLNKSAQELATHIGEVVINKCFCTRRNPISISAAAIYLACQLEDKRKTQAEICKVTGLTEVTLRKVYKELLENWDDLLPSNYTPAVPPERAFPTTVIASGRSSTAKVDAVEVISSLDPEKLPDIKHSKPNEGPGMVHHPRGKDEAVGGYHASHSTLNQQSTFWQSQLPSGTHNHQNVLQGMDIDVSQRNHQQPEHMAEDTTNGAANGSSLKSNQLCSPPASSASSVMRQFSAPPSSGPSNVR

SEQ ID NO: 32691 - protein, 621 aa, Glycine max
  Clone ID: TF_GmC1205_1.pep
TTAAASVSHCAKNVAGERLDDGFLCCGSCGRVLEDYFFAEEPSFVKNAAGQSKLSGNYVRTVQSEYSESRQRTLDRAYDEIKYLSFGLGVNDEHMAEQALTFYKIALERNFTRGRKSEQVHAACLYIAFRHNNKPYLLIDFSNYLRTDVYVLGAVFLQLCQVLRLGEHPIVQKPVDPSLFIHRYTKNLLKRGSKAVSDTALAIVASMKRDWMQTGRKPSGLCGAALYISALAHGIKCSKPDILKIVHVCEATLTKRLVEFEDTESSSLTVEELNTMAKEHEKNSMIMPGGGLKGCISKDLLCEHKEDSGVTHFALGLCEACYKDFDKLSGGLGGGLDPPAFQRAERERFKKTLPEESVDEACALANASNDQFKSHKEDLHAYVPERANVEHEATKDGKYDDSHREDESETLSDIDDEEVDLYIHDEEGKHIKKLLWETANREYLEEQAAKEAAAAANKKAFEANFENCSEDLLAARELAASSAEAVAKSRKEMRQKRAYEAKNTRPAQSAAEAFGQMSNKKRNLQGLKSKVNFELLNELFDEMENTDDLKKPKKVRFDLPLDNDDNIPSKVEDKNEDEMGLADEFDDEGDMGEMYQNTENMADKYFPEDGDFGYDDYDDYY

SEQ ID NO: 32692 - protein, 314 aa, Glycine max
  Clone ID: TF_GmC615_1.pep
MSDAFCSDCKRQTEVVFDHSAGDTVCSECGLVLESHSIDETSEWRTFANESGDNDPNRVGGPSNPLLTDGGLSTVIAKPNGGGGGGEFLSSSLGRWQNRGSNPDRALIIAFKTIATMSDRLGLVATIKDRANEIYKRVEDQKSSRGRNQDALLAACLYIACRQEDKPRTVKEICSVANGATKKEIGRAKEYIVKQLGLENGNAVEMGTIHAGDFMRRFCSNLCMNNQAVKAAQEAVHKSEEFDIRRSPISIAAAVIYIITQLSDDKKPLKDISLATGVAEGTIRNSYKDLYPHVSKIIPNWYAKEEDLKNLCSP

SEQ ID NO: 32693 - protein, 65 aa, Glycine max
  Clone ID: TF_LIB3242-570-P1-K1-C9.pep
SIVAAVIYIITQLSDDKKPPKDISVATGVAEGTIRNSYKDLYPHVSKIIPSWYAKEEDLKNLSSP

SEQ ID NO: 32694 - protein, 47 aa, Glycine max
  Clone ID: TF_11689812.pep
AACLYIDCRRDNEPRTVNEICSVANGASQKEIGRAQEYIVTQLDWEN

SEQ ID NO: 32695 - protein, 137 aa, Glycine max
  unsure (1)..(137): unsure at all Xaa locations
  Clone ID: TF_GmC615_2.pep
NGATKKEIGRAKEYIVXXLGLENGNAVEMGTIHAGDFMRRFCSNLCMNNQAVKAAQEAVQKSEEFDIRRSPISIAAAVIYIITQLSDDKKPLKDISLATGVAEGTIRNSYKDLYPHVSKIIPNWYAKEEDLKNLCSP

SEQ ID NO: 32696 - protein, 223 aa, Glycine max
  Clone ID: TF_GmC299358_1.pep
RPSDHRRVRKSWRTKVEEIVDSHMRKIIQTQDAWMERMLSVVEQREQEMASREEERKRKESMWFDQQVHELWAKEKAWVEARDAALIEVVRKHIGIGIGLEALPLVEEESPNKNKSQGSIDANEFPSEGVDPGRSSSSRWTEMEISNLMQLRTSFEQRFRENNNGYMENGVWDEIAAKMACLGFDRSASECKQIWEEISISLRRTVDECDDGAKEGLGIWDLS

SEQ ID NO: 32697 - protein, 326 aa, Glycine max
  Clone ID: TF_GmC134585_1.pep
RKESRDVDGFRAGVGQNRNTNGVDGGDEGGKAPRLPRWTRQEILVLIQGKRDAENKFRRGRTAGLAFGSGQVEPKWASVSSYCRKHGVNRGPVQCRKRWSNLAGDYKKIKEWESQIRDETESFWVMRNDLRRERKLAGFFDKEVYDILDSLPTTLALSLSSSPPPTTTITTTTVPDDPPHLYDSNRSAPGDGEDGLLSDFEQDEEKNPPSNKDIPAPIPISEKQYLRRCQAEDVTNEKQSTSNPEMGSTSQGERKRKRLATDGEEETLQYQLIDVLERNGKMLSAQLEAQNINFQLDREQRKDHASNLVAVLDKLADALGRIADKL

SEQ ID NO: 32698 - protein, 276 aa, Glycine max
  Clone ID: TF_GmC134585_2.pep
MALEQEGQNRNTNGVVDAGDEGGKAPRLPRWTRQEILVLIQGKRDAENKFRRGRTAGLPFGSGQVEPKWASVSSYCRKHGVNRGPVQCRKRWSNLAGDYKKIKEWESQIREETESFWVMRNDLRRERKLPGFFDKEVYDILDSPAALALALSSSSPPPPTTTKTITLPAEEPLPHLYDSNRSAPGDGEDGLFSDFEQDEVAASSKKNKDIPAPIPISEKLYQPLLRRCQAEDVTNEKQSTSNPEMGSTSQGERKRKRLATDGEEETLQYQLIDVLE

SEQ ID NO: 32699 - protein, 132 aa, Glycine max
  Clone ID: TF_GmC61615_1.pep
VHFLFLFLSHYCLWGEDMGDPYGLPEDLRRLIPARSTHLNPSNTHLLEPLCLHHGLSSAVSSATTPHTSFDPNMVGDVFFPRGFTHHFAHHHDYSSSSGVNPVVTCYCCCYYYCLGSCILQHGKCKERVVWV

SEQ ID NO: 32700 - protein, 52 aa, Glycine max
  Clone ID: TF_LIB4391-037-R1-K1-H3.pep
KKKYYILTKFFDMIEISYFSRIERRNLTGQPGLVKWVIKKHSWMKKKKKKKN

SEQ ID NO: 32701 - protein, 213 aa, Glycine max
  Clone ID: TF_GmC247_2.pep
MGWGRFVERDVDEKVMDTDDYATGLYAGDDADGEKLARKVGPEIMNQLTEGFEEMTSRVLPSPLEDEFLDALDINYAIEFEPEYLVEFDNPDIDEKEPISLRDALEKAKPFLMSYEGIQSQEEWEEIMEETMARVPLLKKIIDHYSGPDRVTAKKQQEELERVAKTLPGSVPSSVKQFTNRAVISLQSNPGWGFDKKCHFMDKLVWEVSQHYK

SEQ ID NO: 32702 - protein, 119 aa, Glycine max
  unsure (1)..(119): unsure at all Xaa locations
  Clone ID: TF_jC-gmXLIB3563P080cd01a2.pep
TFVGRWDYLIDSPLLGDSAVLGTGGGGSGDAVAAAPPAASGGAHDGVVDGGVGGGGGSHPGDDRVDECETSFGGNRWPMXDTLALLXVRPDMDVAFLDACVLGPLWGEVSRSLAELGFH

SEQ ID NO: 32703 - protein, 61 aa, Glycine max
  unsure (1)..(61): unsure at all Xaa locations
  Clone ID: TF_GmC1630_1.pep
MFPCNRSQLVYLRIKDGTVPVXFFQKYLLKKLNIASGAEVEIMCRGQPVLPSVQLHNLVDL

SEQ ID NO: 32704 - protein, 99 aa, Glycine max
  Clone ID: TF_LIB4164-058-R1-N1-E11.pep
METSGEAVAAHGGGEVIMMDANSGEEENNNHNNKGKLEEGGGEEEEGDNKINNSCGGNRWPRQETLALLKIRSDMDVVFRDSSLKGPLWEEVARYTTHI

SEQ ID NO: 32705 - protein, 375 aa, Glycine max
  unsure (1)..(375): unsure at all Xaa locations
  Clone ID: TF_GmC1402_6.pep
MEPNALGGGIFPNISSGLLGVENPLQQQPNLQNQQNPHPLHHPQMVSYATNHDTDTHHQQQPPQQPIKHGYNFSAIKSNKSQSTLSDEDEPVFTAEDNCSGDPKRKVSPWHRMKWTDTMVKLLIMAVHSTGDEAGSECTDPTKKKASGLLQKKGKWKSVSKGMMEKGYYVSPQQCEDKFNDLNKRYKRVNDILGKGTACRVVENQTLLDTMDLSPKMKEEVRKLLNSKHLFFREMCAYHNSCGHNXQLWQYFQRATINRGSTTTSTSTAAVFALIRERGGESEXMLKEDEDEDDDSEEFSDEDEEESGEGGSRGMEEDENDVIRRRARNKGGXGVSSSQMMQQLSGEVSGVLQDGGKSAXEKKQWMKKRGVQLEE

SEQ ID NO: 32706 - protein, 66 aa, Glycine max
  Clone ID: TF_LIB3242-239-Q1-J1-C9.pep
DKPRRKLSSLSLSLFFFSFFVFSLCIRKMAELGYHRSSKKCKEKFENVYKYHKRTKEGRSGKQDGK

SEQ ID NO: 32707 - protein, 184 aa, Glycine max
  Clone ID: TF_GmC429768_1.pep
MEMEDHHQYGIADLRQLVNGPRPTHFPAMPPQPKAELFPGGGGGHPNLQAATQQHYEMMMFGRQVADIIPRCLHDFAPTDSATNIAVATPTTTTSASTPPLSCLEAETAGCIGGDASTGRWPRQETLTLLEIRSRLDSKFKEANQKGPLWVEVSRYHFKHYSLLFSTLTSENYNYLFGWFFAWD

SEQ ID NO: 32708 - protein, 364 aa, Glycine max
  Clone ID: TF_GmC1402_2.pep
TDTMVRLLIMAVYYIGDEAGSEGTDKKKSSGLMQKKGKWKSVSRAMMEKGFYVSPQQCEDKFNDLNKRYKRVNDILGKGTSCRVVENQSLLDSMDLSPKMKEEVKKLLNSKHLFFREMCAYHNSCGHGNNNAPQQGESGGEVSQPQAQPHHHQQQQQQPQQRCFHSSEVGNLGGSGVEGLRMLKVGNGEEGDDDSEDDDDSEDDSDEDEDDSGEGGSRGHVGHGHEDIEDENDGRSMRKRARKVGGVSMSPQLMQQLSAEVSGVFQDVGKSAWDKKQWMRSRIMQLEEQQISYHTQAFELEKQRLKWARFSSKKEREMETAKLENERRRLENERMVLLIRQKEFELMSLQHQQQQQHQQQHSST

SEQ ID NO: 32709 - protein, 444 aa, Glycine max
  Clone ID: TF_GmC1516_1.pep
MEGNLPQGGIIQGGTSFGGFDLPGSIRVQHQAQHPHSMHQHQTHPRQGSSVHSAVHDGFPLTMGTMQNCDQTISLADFSKGDRSKNSASEEDEPSYTEDGVDCHHETTRGKKGSPWQRVKWTDKMVKLLITAVSYIGEDVTADGGSSGRRKFAVLQKKAQWKSVSKVMAERGYHVSPQQCEDKFNDLNKRYKKLNDMLGRGTSCQVVENPVLLDVIDFLSEKEKDDVRKILSSKHLFYEEMCSYHNGNRLHLPHDPALQRSLQLALRNRDDHDDDMRRSHHDEDDQDVEIDDHDDFEENCASHGDSRGIYGPLGGSMKKLKQCQGQEDANTFGNSLNCQDYNKSSYPHGQMIPSDVNQGLPEGMKAAWLQKQWVESRTLQLEEQKLQIQVEMLELEKQRFKWQRFSKKKDRELEKLSLENERMKLENERISLELKRKEMGTGFK

SEQ ID NO: 32710 - protein, 61 aa, Glycine max
  unsure (1)..(61): unsure at all Xaa locations
  Clone ID: TF_LIB3242-558-P1-J1-A8.pep
RKLAELGYNRNAKKCKEKGENVYKFHKRTKEGRSGKSVGXTYRXQEQIQALENNPAIHGKQ

SEQ ID NO: 32711 - protein, 150 aa, Glycine max
  unsure (1)..(150): unsure at all Xaa locations
  Clone ID: TF_GmC5795_2.pep
GNWLVLWNFGAAATAITTTPSSLSSLSSSRWPKTEVHALIRLRTSLETKYQENGPKAPLWEDISAGMLRLGYNRSAKRCKEKWENINKYFKKVKESNKQRREDXKTCPYFNELEALYKEKSKTQNPFGASFHNMKPHEMMEPLMVQPEQQ

SEQ ID NO: 32712 - protein, 604 aa, Glycine max
  Clone ID: TF_GmC517_1.pep
MHTTIFGRPPLLFRLFIAPRPPLPLHLSLPLLPHASSSPPPPTLPPLPPSTPAPHPLAPSPLSHQPLLPPPPSPPPQHPLGPVPVRIRKMILGIQRDQRQLPDQLTDSWTNDEVLALFRIRSSMENWLPELTWDHVSRRLAEVGFKKSAEKCKEKFEDESRYFDNINNYGKNNFRFLISELEELCQNSDPGAHDHNGVVVRSEKTHHLGGHALEENSRDIETTTATKRCDIGSDTVVEKSNSKVRKRKRRDRFEMFKGFCESVVNKMMAQQEETHNKLLEDMVKRDQEKFAREEAWKKQELDRMKKELEIMAQEQAIAGDRQATIIEFLKKCATTTITSLSPPSQNAKYYITNDSNLPNCASHSQNPNNPSNEDNNLEPTPSSKMIQNHGQTTLGAENPSTSDTLLQVPSSSNSSPTTHNPSSSLNSHNNIIPLESNSVSTYKPTSTTPMASSENSKDDMGRRWPRDEVLALINLRCTSLSSNEEKEGNKGPLWERISQGMSALGYKRSAKRCKEKWENINKYFRKTKDNVNKKRSLNSRTCPYFHQLSCLYGQGKIVPQSEREGNYCLNPTPNSGQVPPDDDHQVQDDESSQVGSAGLVQYAC

SEQ ID NO: 32713 - protein, 279 aa, Glycine max
  unsure (1)..(279): unsure at all Xaa locations
  Clone ID: TF_GmC36_2.pep
GLSEQQNLGQALTNINLVQPQPQLQPQPPVQQQVTPPNIVPAPMQQPLPVIVTQPVVLPVVSQVTNMEIMKADNNNNNNNNNNCENFLPPSSSRWPKVEVQALIKLRTSMDEKYQENGPKGPLWEEISASMKKLGYNRNAKRCKEKWENINKYFKKVKESNMRRPEDSMTCPYFHQLDALYRQKHKAEESTEAEKAESGGGPMMVXPEQQWPPQQQDDRDITMEDMENEYDEYEEEREGEEEEEEDEQEEEGGGGNYEIVANKTSGGGGAAASVGASTE

SEQ ID NO: 32714 - protein, 667 aa, Glycine max
  unsure (1)..(667): unsure at all Xaa locations
  Clone ID: TF_GmC36_1.pep
MLGDSAVLGAGGGGGGGRGGGVESGASADAVAATVTVTHDVATTTGGGGGGSNNSGDDERGRIEEGERSFGGNRWPRQETLALLRIRSDMDVAFRDASVKGPLWEEVSRKMAELGYHRSSKKCKEKFENVYKYHKRTKEGRSGKQDGKTYRFFDQLQALENHSPTPHSPNPSPKPPQSAPSRVVASSVSLPIATTTTVSLPIPTPTTVPMQPILSNNAILTSSVPNITVPSTTPLPITIPQPILTSPSINLTIPSYPPTNPTNFPPPPNPTLPSSFPTDTFSNSSSSSTSSEETLEGRRKRKRKWKDFFERLMKEVSEGQEELQKKFLEAIEKREDDRIAREEAWRVQEMKRINREREILAQERSIAAAKDAAVMSFLQKIAEQQNLGQVSTNINLVQQPQPQLQPQPPLQQQVTQPSIAAAQPPVQQPPPVVVTQPVVLPVVSQVTNMEIVKADIIVTTXNNGENFLAPSSSRWPKVEVQALIKLRTSMDEKYQENGPKGPLWEEISASMKKLGYNRNAKRCKEKWENINKYFKKVKESNKRRPEDSKTCPYFHQLDALYRQKHRGEESPAAVEAKPESAVAPLMVQPEQQWPPQQQQQDRDITMEDMENEDDEYEEEREGEEELEDDEDEEDEEGGGGGGNYEIVANKTSGGGGASAASVGASTE

SEQ ID NO: 32715 - protein, 522 aa, Glycine max
  Clone ID: TF_GmC247_1.pep
MQFFEIQVLKVHFGKKFQGNWQNLDIKEAQRSARKNLRTCTSTTREPKRTKVANHMEKPINSLINYKPLRTNSQVSYPPKPQPTSTLATTNPLTLPTRPSDHGNKVISYVTTFPSTNPTLISPSPQTNTTTTTTTTTSTTNPRDSSRPQTNNNNNSVTHSLPNMNTSFSTTTASTSSSTASDEDLEERYRRKRKWKDYFRRLTRKVLLKQEEMQKKFLEAMDQRERERVAQQDNWRMQEMARINREHEILVQERSTAAAKDATVIALLQKMYGQQNPTQQVEVEPPPQQKQTIPQSLPPILMPNNNFEVKKINNGHSVTSTTTGTVATATTTTSPVNSSSSRWPKAEVHALIRIRTSLETKYQENGPKAPLWEDISIAMQRLGYNRSAKRCKEKWENINKYFKRVRESSKERREDSKTCPYFHELEALYKEKSKSSKNPFGIFQNMKPNEMMLMMTEPLMVQPEQQWRPPPQSLEEGVGMENASEEYHENEENGGDDDDNIEEDGDSVEDEGANPCEIATNN

SEQ ID NO: 32716 - protein, 464 aa, Glycine max
  unsure (1)..(464): unsure at all Xaa locations
  Clone ID: TF_GmC1404_2.pep
MPLPLPPVSNNNNNTTVPSTTSLPMPQSILNITPPSTLNITIPSFPPSNPTTYFPTQTPNPTSNNNNNPPSTITPPSFPNFPADLLSNSSSSSTSSEETPTTEARGRKRKRKWKDFFERLMKEVIEKQEELQRRFLEAIEKREQERVVREEAWRMQEMQRINREREILAQERSIAAAKDAAVMTFLQKIAEHQQQETINLEPALNNNSITVVPQQPVPQATPTSTPTPQQAQTTTVPEAPQVQPLVPQLQQQQQIVVSNVEINKADNNGENLMMEASSSRWPKVEVQALINLRTSLETKYQESGPKGPLWEEISALMRKMGYNRNAKRCKEKWENINKYFKKVKESNKKRPEDSKTCPYFHQLEALYREKNKGEGQMKPESMMAPLMVQPEQQWPPQTTLVVPPEVTMGDTQNDPXMDRQYHEENEDDEDDKEIGDEDEDEDDEGGDNYEIVASKPATADASGE

SEQ ID NO: 32717 - protein, 308 aa, Glycine max
  Clone ID: TF_GmC25141_1.pep
MFGGGGEDALAARLGMMPPSLLNPASVMSGEMSPAVPAAREERGPAQPQWSQQETREFIAIRAELERDFTASKRNKTLWEVVSAKMRERGFRRSPEQCKCKWKNLVNRYKGKETSDPEHGKQCPFFEELHAVFTQRAHNMQRLLLESETRSAHTKKGVKRSSGDRSSEELSEDDNEVEYDSEEEKPSRSNTRKTKVDKVGVEKSSRASNPSNSASNSTSIQEMLKEFFQHQLSMEMQWREMIERRAHERQLFEQEFIKSLKKLERERLMIEQAWREREEQRRMREESRAERRDALLTTLLNKLINESN

SEQ ID NO: 32718 - protein, 552 aa, Glycine max
  unsure (1)..(552): unsure at all Xaa locations
  Clone ID: TF_GmC1404_3.pep
MDVAFRDASVKGPLWEEVSRKLAELGYHRNAKKCKEKFENVYKYHKRTKEGRSGKSEGKTYRFFDQLQALENNPSIHAMQSPTPTPSKPPQTTALLATPVSIVVTTTTTPSTLVSNNATVPSTNTPPLPQAILNITPPSTLNITTPSFPSSNPTTYFPTQTPNPTTNNNPPNTITPASFPNFSADLLSNSSFSSTSSEETTTMGGGGMRRKRKRKWKDFFERLMKEVIEKQEGLQRRFLEAIEKREQERVVREEAWRMQEMQRINREREILAQERSIAAAKDAAVMTFLQKIAEHQQQEINLEPALNNNNNSITVVPQQPVPQTTTTPTPTPQQAQTTIVPEAPQPQQQIVVSNVENNKADNNGENLTMGASSSRWPKMEVQALINLRTSLETKYQENGPKGPLWEEISALMRKMGYNRNAKRCKKKCXNINKYFKKVKESSKKRPEDSKTCPYFHQLEALYREKNKREGQMKPDSMMAPLMVQPEQQWPPQTHVVPPEVTMGDAQNDPMDRRHEEVEEDEADKEIGDEDEDEDDEGSDNYEIVASKPASGE

SEQ ID NO: 32719 - protein, 295 aa, Glycine max
  unsure (1)..(295): unsure at all Xaa locations
  Clone ID: TF_GmC325_1.pep
MEGHHLHHHHRQQQQQQHHHQQQHQQQQHHHHPHHNITTSNVDATDRFPQWSIQETKEFLMIRAELDQTFMDTKRNKQLWEVISTRMKEKGFHKSAEQCKCKWKNLVTRYKIXKGCETMEPEATRQQFPFYNELQAIFAARMQRMLWAEAEGGSNKKKVHLSSEDEEEGNEETSEGDHKGNITSKKKKKGKMVIGGGGSGNNNLESLKEIMDEFMRQQMQMEAQWMEAFEARENERRLKEMEWRQTMEALENERLMMDQRWREREEQRRIREEVRADKRDALITALLNKLRREEM

SEQ ID NO: 32720 - protein, 234 aa, Glycine max
  Clone ID: TF_GmC325_2.pep
MEGHHLHHRQQQLQQHHHPHHNITTSNVDATDRFPQWSIQETKEFLVIRAELDQTFMETKRNKQLWEVISNRMKEKGFHRSAEQCKCKWKNLVTRYKGCETMEPEAMRQQFPFYNELQAIFAARMQRMLWAEAEGGSNNKKKGMHLSSDDEEEGNEEMMSEGDHKGNIIISKKNKKKGKMVIGVGGSGNNNNNSSSSSNNLEREEQRRIREEVRADKRDALITALLNKLRREEM

SEQ ID NO: 32721 - protein, 138 aa, Glycine max
  Clone ID: TF_LIB3242-060-Q1-J1-B12.pep
SHKAFSFVFFTLSSFGVIVIRKLAELGYNRNAKKCKEKFENVYKYHKRTKEGRSGKSEGKTYRFFDQLQALENNPAIHGKQSPTPPKPPPQTTALSATPVSIVVTTTTTTPSSIIMPLPLPPVSNNNNNTTVPSTTSL

SEQ ID NO: 32722 - protein, 499 aa, Glycine max
  Clone ID: TF_GmC247_4.pep
EVSRKLAELGYQRSAKKCKEKFENVYKYNKRTKENKSGKSHGKAYKFFDQLQALENQFTVSYPPKPQPTSTLTTTNTLTSDHGNKVISYVTPFPSTNPTLIPPSPQTNTNTTTTTTTTSTTDPRDSSPPQTNNNNNSVPHSLPNMNAPFLTTTTSTSSSTASDEDLEERYRRKRKWKDYFRRLTRKVLLKQEEMQKKFLEAMDQRERERVAQQDNWRMQEMARINREHEILVQERSTASAKDAAVIALLQKMYGQQNPTQHVEVEPPQQQKQTMPQSQPPILMPNNNFEVKKMNNGHSATSTTTTTTSPVSSSSSSRWPKAEVHDLIRLRTSLEIKYQENGPKAPLWEDISIAMQRLGYNRSAKRCKEKWENINKYFKKVRESSKERREDSKTCPYFHELEALYKEKGKSQNPFGMFQNMTPNETMMMEPLMVQPEQQWRPPPQSLEEGIGKDNASEEYNQEKEEEVEENGGDDDDNIEEDGDSVEDAGPNPCEIATNN

SEQ ID NO: 32723 - protein, 97 aa, Glycine max
  unsure (1)..(97): unsure at all Xaa locations
  Clone ID: TF_LIB3242-366-Q1-J1-B12.pep
MLGDSALLGGGGGEGGASADVVAATATHDATTTTTTGGGGGGSNNSGDDERGRIEEGERSFGGNRWPRQETXAXLRIRSDMDVAFRDASVKSPLWEE

SEQ ID NO: 32724 - protein, 257 aa, Glycine max
  Clone ID: TF_GmC1796_2.pep
MLEISTLPETATENADGGSAAVSDGSKAEHSEDGDRNSAANRWPREETMALLKIRSEMDVAFKDANPKAPLWEQVSRSLAELGYNRSAKKCKEKFENVYKYHRRTKEGRFGKSNGAKTYRFFEQLEALDGNHSLPPPTTTTDNNNNVDDDDVILNAVPCSVIAAAAHEHSSSTTSSSGKMKRKLTRFLEGLMREVIEKQETLQRKFMEVLDKCEKDRMAREEAWNKEELERIKKERELLAHERSIAACKDEAVLVFL

SEQ ID NO: 32725 - protein, 193 aa, Glycine max
  Clone ID: TF_GmC4164_1.pep
IPGVDPRVRNTASGPEGYLSEEDNTASGAEGDLSESEDSDEFWKPFITSLPVEKSINADNGYVSPKEQKSNLKKDESEDIDEAKSEETSNSEAKSSKSVKRNKWKTEEVKKLIGMREELSERFQVVKGRMALWEEISQKLLADGICRSPGQCKSLWTSLVVKYEGIKNEDRKKSWPYIEDMERIMSDKEAPAK

SEQ ID NO: 32726 - protein, 186 aa, Glycine max
  Clone ID: TF_GmC1059_2.pep
VTGIQNHSENQNEDGSEILNSTTARGAESWTESEIARLQQLRAEMETRYMQSGCSEEVMWEEIATKMACFGYERSAVVFKEKWESISNYARSVKDGSKKRKEDSRSCFYFDNSDQSSLYNQGGAYCDINDQRHKTGRLQTNDGSSPSNSNVGNTVALDNCFPFLMTESGNLWENYSLKVNKASQNQ

SEQ ID NO: 32727 - protein, 151 aa, Glycine max
  unsure (1)..(151): unsure at all Xaa locations
  Clone ID: TF_GmC429768_2.pep
MEMEDHHRHHHQYGITDLRQLVNGPRPTHFPTMPPPPKAELFPGDSNLQAATQQHYEMMMFGRQVADIMPPRCLHDFASTDSATNIAVATPTTTPSAFTPLSCLEAETAGCIGGDASTGRWPRQETLTLLEIRSRLDSKFKEANXKGPLWD

SEQ ID NO: 32728 - protein, 148 aa, Glycine max
  unsure (1)..(148): unsure at all Xaa locations
  Clone ID: TF_LIB4366-014-R1-N1-D5.pep
VLALINLRCTSVNNNTXNEEKEGNNKVPLWERISQGMSELRYKRSAKRCKEKWENINKYFRKTKDITKKRSLDSRTCPYFHQLSSLYNQGKLVLQSESHLNNTPPDQNPEQVKPDQTTQAHESSSQVGSGSGFSVQQQQVPSLDFDQF

SEQ ID NO: 32729 - protein, 422 aa, Glycine max
  unsure (1)..(422): unsure at all Xaa locations
  Clone ID: TF_GmC1059_1.pep
SSRIGSRSGKKCREKFENLYKYYKKTKEGKAGRQDGKHYRFFRQLEALYGENSNQASVPETNFGSGSLRFHTSSRANXPRETNQEMFQSQKHCDSLSLTNFTDLDTSSSDDNDQNSTGRELNKDNDSMEKRRKRVSGRSWKVKIKDFIDSQMRKLVEKQEEWLDKLTKTLEQKEKERVLREEEWRRQESVRLEREHKFWAKERAWIEARDAALMEALHKLTRNEIMKSTHSHEGLMVTGIQNHSENQNEDGSEILNSTTARGAESWTESEIARLQQLRAEMETRYMQSGCSEEVMWEEIATKMACFGYERSAVVFKEKWESISNYARSVKDGSKKRKEDSRSCFYFDNSDQSSLYNQGGAYCDINDQRHKTGRLQTNDGSSPSNSNVGNAVAGDNCFPFLMTESGNLWENYSLKVNKACQNQ

SEQ ID NO: 32730 - protein, 348 aa, Glycine max
  Clone ID: TF_GmC5795_1.pep
RRAAPSVATSPTTPPPSGASCHIPKPPVLIVPKIVPPAQQWRPPTQDEQGAAKEHKNSEWKEREEGVEGEDDDENEEGDKEKWEDIDNNVKEVVAQQEAWRVQDMARINRKHELLVQERSTAAAKNVAVIAFLQQLSGQHQNSTVTQAQLNFPQQPPPQKVTIVQPPPQQAPQPQAPLVLSNSDNMEIQKMNNGHSVVTATVTATATPTPTTTFVAAATAITTTPSSLSSLSSSRWPKTEVHALIRLRTSLETKYQENGPKAPLWEDISAGMLRLGYNRSAKRCKEKWENIIKYFKKVKESNKQRREDSKTCPYFNELEALYKEGSKTQNPFGASFHNMKPHEMMEDR

SEQ ID NO: 32731 - protein, 655 aa, Glycine max
  Clone ID: TF_GmC1404_1.pep
MLGDSAVLGTGGGGSGDAVAAAPPAASGGAHDGGVDGGDGGGGGSNSGDDRVEEGERSFGGNRWPKQETLALLKIRSDMDVAFRDASVKGPLWEEVSRKLAELGYNRNAKKCKEKFENVYKYHKRTKEGRSGKSEGKTYRFFDQLQALENNPAIHGKQSPTPPKPPPQTTALSATPVSIVVTTTTTTPSSIIMPLPLPPVSNNNNNTTVPSTTSLPMPQSILNITPPSTLNITIPSFPPSNPTTYFPTQTPNPTSNNNNNPPSTITPPSFPNFPADLLSNSSSSSTSSEETPTTEARGRKRKRKWKDFFERLMKEVIEKQEELQRRFLEAIEKREQERVVREEAWRMQEMQRINREREILAQERSIAAAKDAAVMTFLQKIAEHQQQETINLEPALNNNSITVVPQQPVPQATPTSTPTPQQAQTTTVPEAPQVQPLVPQLQQQQQIVVSNVEINKADNNGENLMMEASSSRWPKVEVQALINLRTSLETKYQESGPKGPLWEEISALMRKMGYNRNAKRCKEKWENINKYFKKVKESNKKRPEDSKTCPYFHQLEALYREKNKGEGQMKPESMMAPLMVQPEQQWPPQTTLVVPPEVTMGDTQNDPMDRQYHEENEDDEDDKEIGDEDEDEDDEGGDNYEIVASKPATADASGE

SEQ ID NO: 32732 - protein, 608 aa, Glycine max
  Clone ID: TF_GmC696_1.pep
MKEEVKKREVETQNTNTNMFDGVPDQFHQFITPRTSLPLHLPFPLHTSGGTPNTTTFPSNFDPYNHPHQLPLQPNNLLHPLHHKDEDKEENTTVPMNLEIQRDQRQQLPELIDPWNNDEVLALLRIRSSMESWFPELTWEHVSRKLAELGYKRSAEKCKEKFEEESRYFNNINYGKNNNNNNNSSNYRFLSELEQLYHQGGSGDHHLENTTQPPLQKQDKMGHHALELEVEGDSRNVVDALVTKQNEQSDEALAVEKITKDRKRKRPDRFEMFKCFCESIVHKIMAQQEEMHNKLLEDMMKRDDEKFTREEAWKKQEIEKMNKELEMMAREQAIAGDRQANIIQILNKFSATSSPASHTLKKVNNDSNLNIHITQNPNPSQTENPTLSVAQDTLQVIPSTSSTSTPALPQNPSSYSLNIQNNNNNIPVETNSVLNKGNEKDDVGRRWPKDEVLTLINLRCTSVNNNNNEEKEGNNKVPLWERISQGMLELGYKRSAKRCKEKWENINKYFRKTKDVNKKRSLDSRTCPYFHQLSSLYNQGKPVLQSESHLNSPPNQNPEQVTPDQTTQAHESSSQVGSGGGFSVQQQQVDHGGEKTLMQVPSLDFDQF

SEQ ID NO: 32733 - protein, 374 aa, Glycine max
  Clone ID: TF_GmC1490_1.pep
MYLSEKPRPIDFYKEEGARDMMIEVVSNGDLPPPPPPPPMILGESSGEDPEVEIKAPKKRAETWVQDETRSLIGLRREMDALFNTSKSNKHLWEQISAKMREKGFDRSPTMCTDKWRNLLKEFKKAKHQDRGSGSAKMSYYKEIDEILRERSKNVQYKSPTPPPKVDSFMQFADKGIDDTSISFGPVEATGRPTLNLERSLDHDGHPLAITTADAVAASGVPPWNWRETPGNGGESQSCCGRVISVKWGDYTRRIGIDGTPEAIKEAIRAAFRLRTKRTFWLEDEDQIIRSIDREMPLGNYTLHIDEGMAIKLPLYDEPDHIPVHTEDKIFYTEDDFRDFLTRRGWICLREFDSYRNIDNMDDLRPGAIYRGVS

SEQ ID NO: 32734 - protein, 489 aa, Glycine max
  unsure (1)..(489): unsure at all Xaa locations
  Clone ID: TF_GmC1796_1.pep
MLEISTLPETATENADGGSAAVSDGSKAEHSEDDDRNPAANRWPREETMALLNIRSEMDVAFKDANPKAPLWEQVSRKLSELGYNRSAKKCKEKFENIYKYHRRTKEGRFGKSNGAKTYRFFEQLEALDGNHSLLPPTTTVGDDVVLNAVPCSVSAAAHEHSSSTTSCSGKKKRKLTQFLEGLMREVIEKQETLQRKFVEVLDKCEKDRMAREEAWKKEELERIKKERELLAQERSIAAAKDEAVLAFLRKFAEAEDTVQLLEKIQVQNDKQKNMKQNGGNDNANGGGGVTVVTDMDKQECGNTNXRVSVGNFVHMSSSRWPKDEVEALIRLRTEFDVQAQGNNNNSNNGSKGPLWEEISLAMKSIGEVQVKWENINKYFKRIEMGEHNFCLSQPLHEETCPYYHHPEALYSKKPKKVDHGNELKPEELLMHIMVSQSQEQQQQQEMQTQTQSPSEDAERDQNQGDNEDQSEYQNQMVDNNSPSIAIMS

SEQ ID NO: 32735 - protein, 112 aa, Glycine max
  Clone ID: TF_LIB3050-002-Q1-E1-G8.pep
ENINKYFKRIKEKSKRKPQDSKTCPYYHHLEALYSKKPKKVDLGNELKPEELLMHIMVSQSQEQQQQQEMQTQTQSPSEDAERDQNQGDNEDQSEYQNQMVDNNSPSIAIMS

SEQ ID NO: 32736 - protein, 524 aa, Glycine max
  unsure (1)..(524): unsure at all Xaa locations
  Clone ID: TF_GmC1764_1.pep
PIDPSTLVKAEDIDAYAPKDLLIVTTGSQAEPXAALNLASYGSSHAFKLAKEDVVLYSAKVIPGNESRVMKMLNRISEIGSTIVMGKNEGLHTSGHAYRGELEEILRIVKPQHFLPIHGELLFLKEHELLGKSTGIRHTAVIKNGEMLGVSHLRNRRVLSNGFISLGKENLQLMYSDGDRAFGTSSDLFIDERLKIALDGIIVISMEIFRPQNLDSPVENTLKGKIRITTRCLWLDKGKLLDALHKAAHAALASCPVSCPLAHMEKIVSEMLRKMVRKYSGKRPEVIAIAIENPAAVLANEINTKLSGKLNVDGMSALRKVVDGHEKENQRTEMQIRDRIDVGGLLPTKDNAISSGAEDGLSDAEDPNDYFKPFVESSPVEKSIKTNNGYVPRKEKSSPLKDDCSEDTEECNSVNTSDSEPKSSKSAKRNKWKHEEVKKLIDMRGELNDRFQVVKGRMALWEEISQNLLANGISRSPGQCKSLWTSLLQKYEQEVKNEKKNKKKWPYFEDMERILADNKTLETK

SEQ ID NO: 32737 - protein, 155 aa, Glycine max
  Clone ID: TF_GmC1490_2.pep
MYLSEKPRPIDFYKEEGARDMMIEVVSNGDLPPPPPPPPPPMILGESSGEDPEVEIKAPKKRAETWVQDETRSLIGLRREMDSLFNTSKSNKHLWEQISAKMREKGFDRSPTMCTDKWRNLLKEFKKAKHQDRGSGSAKMSYYKEIDEILRERSK

SEQ ID NO: 32738 - protein, 338 aa, Glycine max
  Clone ID: TF_GmC4079_1.pep
MDLFTGDHFPVPDHVAPFPDSGDLLFAADLLSHRHNPQKFRPIRSVPTAPIANPSPPPLSHDPIPSGSGHAPCHESSLSFDAEDEDEDDDNSSASTKGHGPRKKRRKMVRKLEDFAKDLVVKVMEKQEQMHKQLLEIIENNERERIKREAAWKNEEMERIRKDEEARAQENSRNLALISFIQNLLGHEIQIPQQPAKPCSKREEDEVEASARKELNNDPGDNRWPDVEVQSLITVRTSLEHKFRLMGSKGTIWEEISEAMNGMGYNRSAKKCKEKWENINKYYKRTIGSGKKRRQNSKTCPYFDELDILYRKGLLSIGNALSNTCGVPQIEVKELNET

SEQ ID NO: 32739 - protein, 45 aa, Glycine max
  Clone ID: TF_jC-gmro02910048f02a1.pep
ARALHRSVAEPRIIVQTTSEVNLLDDGYRWRKYGQKVVKGNPYPR

SEQ ID NO: 32740 - protein, 47 aa, Glycine max
  Clone ID: TF_GmC1323_2.pep
TSVRGCPARKHVERAVDDSNMLVVTYEGEHNHSQIASEVANVILESS

SEQ ID NO: 32741 - protein, 169 aa, Glycine max
  Clone ID: TF_GmC328634_1.pep
LQREPRCRGGENCKLRTMLDQITKNYNQLQLFIALQKQKQCQKMETNLNGMMFGQHLLDPRGPFTKLDAQVAPFADDKSGQRGHPETDPVEDVLEQSTSQSWGSSKSPKFEESNSSELPLKKTRVSVRARSEAPLISDGCQWRKYGQKIAKGNPGPRAYYRCTMAVGCP

SEQ ID NO: 32742 - protein, 69 aa, Glycine max
  Clone ID: TF_GmC273044_1.pep
VSSILIFVNYSYCRCSYRGCNVKKQIQRHTKDEEIVVTTYEGMHIHPVQKSTESFEHILRNDHIYSLTL

SEQ ID NO: 32743 - protein, 162 aa, Glycine max
  Clone ID: TF_jC-gmst024140b12a1.pep
GSRVITFFTNTGCPFRKHVVRASHDPKAVITTYEGKHNHDVPTARNSCHDMAGPASACGQTRVRPEESDTISLDLGMGISPAAENTSNSQGRMMLTEFGDSQIHTSNSNFKFVHTTTAPGYFGVLNNNSNPYGSKENPSDGPSVNHSAYSCPQNIWRILMGH

SEQ ID NO: 32744 - protein, 167 aa, Glycine max
  Clone ID: TF_GmC943_1.pep
ISSASNSAAEKETVGSRYKWVSRVAFRSTQGCWATKQVQRSDEDPTMFDITYRGNHTCSQGNNAVLPPKSPEKHEKPAHSHNIDIHHAQASQESLAKFRKSNYFPSPTFQMNEFDGIYNRSHSKSDINEIISTNTSATNSPIPDFNFSLDPVEIDPNFPFNTPGFLC

SEQ ID NO: 32745 - protein, 167 aa, Glycine max
  Clone ID: TF_GmC94_3.pep
IDIYLDLSIFRNYYRCTHKFDQGCQATKQVQRVQEEPILYKTTYYGLHTCKNLANPEIILDPMSPSSSSKFLSFDNSFPTPSKQECPFLSSSNLPSSVKGECKEEVPPSTSSNHYLISSDLTFDSSPRHHVTLSSTLDSEYKSVDISDVLYDSAQLDDAFEPFLEFR

SEQ ID NO: 32746 - protein, 69 aa, Glycine max
  Clone ID: TF_GmC1329_2.pep
FGSRENENDGHSYSSAGSRTVKEPRVVVQTTSEIDILDDGYRWRKYGQKVVKGNPNPRYFHLLDFNRRV

SEQ ID NO: 32747 - protein, 80 aa, Glycine max
  Clone ID: TF_LIB3242-323-Q1-J1-D7.pep
QQQPWSYQETTKQDNFSSGKSMMKTEKSSSMQSFSPEIASVQNNHSNGFQSDYGNYPPQSQTLSRRSDDGYNWRKYGQNK

SEQ ID NO: 32748 - protein, 265 aa, Glycine max
  Clone ID: TF_GmC1330_3.pep
VVFRTRMEEAASAGLKSMEHLIRLLSPTSYNSNSSSSPLLNTNPNNLHCSQITDFTVSNFKQVINLLNRTGHARFRRSPPQAQAQAQTQATQTQTSLQPQPETQQQGFSLDFVKPTILNSKPINKDETLTLSTTSSSFMSSVTNDASVSDGKIGPFLPPSAAKPPLSSAHRKKCRDAAAALSAKPSCHCSKKRKSRVKRTIRVPAISSKIADIPPDEYSWRKYGQKPIKGSPYPRYYSIPSSIFMLNRSKSNADLKVLSFRINYD

SEQ ID NO: 32749 - protein, 53 aa, Glycine max
  unsure (1)..(53): unsure at all Xaa locations
  Clone ID: TF_jC-gmXLIB3563P059cb11a1.pep
GQTMAKGNPCPRAYYRCTMAVGCSVSIPVLRCADDRTIXVTTYDGSHNHPLPP

SEQ ID NO: 32750 - protein, 132 aa, Glycine max
  Clone ID: TF_jC-gmst02400030c12d1.pep
ERSILREFVWNLEPDQPNRIGTDDGLWKPVQSSLTDSIEPVAAAPSRSNNQSISSSSSEDPPEKSTVSDDKPPEIPSKGKNKGQKRIRQPRFAFMTKSEVDHLEDGYRWRKYGQKAVKNSPFPRFTATFTSN

SEQ ID NO: 32751 - protein, 202 aa, Glycine max
  Clone ID: TF_GmC737383_1.pep
MSTTSHPIVHHSLFDEQDQIPTQMGFFSFPTNLTFPPLGCHQSSLKAFSSIAPSSLAISQQDSASNLTAETLFSTTAQKSREDLTSSFGGGQFLSLHRSSVNPWALGEVAECFSSKRSGFDDHHFRISAMKMKKIKARRKVREPRFCFKTMSDVDVLDDGYKWRKYGQKVVKNTQHPSYFRSSLDSCPLLVSPVRLSLIKEY

SEQ ID NO: 32752 - protein, 93 aa, Glycine max
  Clone ID: TF_uC-gmflLIB3260P015f01b1.pep
PPLNLGFPYKKFFYVACPCFLFFVFFYWPPFFFFFFFFFFFFFFFFFFFFFFFFFFTEKLTTSGLHCRGYYRCTQRNVQGCLATKQVQRRTRG

SEQ ID NO: 32753 - protein, 120 aa, Glycine max
  Clone ID: TF_GmC1080_1.pep
MEVKTRVQRCMDDQSVLVATYEGEHNHTHPSQMEVTTGSNRCMTLGSVPCSASLSSSPPTATLDWTKSKSSSESKNTSPKTESPEVPQVLVEQMATSLTKDPNFRAALVAAISGKMLHNN

SEQ ID NO: 32754 - protein, 77 aa, Glycine max
  unsure (1)..(77): unsure at all Xaa locations
  Clone ID: TF_LIB3242-205-Q1-J1-E11.pep
SFYRERWRXYIXXFFTFNPNPIIYYKYTNTCCPFRKHFDKSSHYPKSFITTYYWNHNHHVPTTKNIFHYISIPSFSN

SEQ ID NO: 32755 - protein, 153 aa, Glycine max
  unsure (1)..(153): unsure at all Xaa locations
  Clone ID: TF_LIB4280-035-Q1-K1-C10.pep
MMNQLAALQETQLNEYHNTTYQGISSSKQSIAKILAPVSSVGRGSSNSEAQKRKVVAEPKIFQEVTRKLYKTINADKRREVWTAQIRVNAEGCDDDGYSWRKYGQKEILGAKYPRIHXRVPCQREEEDGQGHMFRRRLKRVRMVNSSFLLIFL

SEQ ID NO: 32756 - protein, 172 aa, Glycine max
  Clone ID: TF_GmC1027_3.pep
MENTKMMGVKIQDYASNMESNNYPFFDFSEDKGSLGFMELLGAQDYSPLLDFPLSSHVSGPQTSSVKEPPETKKECSEVTNNNQQPATPNSSSISSASSEVFYDEQNKTVDQAPEHQKTKEQLKAKKTNQKRQREPRFAFMTKSEVDHLEDGYRWRKYGQKAVKNSPFPRSY

SEQ ID NO: 32757 - protein, 114 aa, Glycine max
  Clone ID: TF_GmC6804_1.pep
NYMNYGIIFFCYFFIFLHHINHLPLDLIFLSLFVIQKIIHAQCIVYKYNIYIYIYIYIYIYIYIYIYIYIYIYLEHAGMHTQVNFVLVLFLFSFDLTEEKTARENRNEEESRCK

SEQ ID NO: 32758 - protein, 56 aa, Glycine max
  unsure (1)..(56): unsure at all Xaa locations
  Clone ID: TF_LIB3093-052-Q1-K1-F6.pep
IMVNDICKKHANINNDDYSWRKYGKKTVKGYIXNRGYKKRRSMRGCTARKHGSGRV

SEQ ID NO: 32759 - protein, 151 aa, Glycine max
  unsure (1)..(151): unsure at all Xaa locations
  Clone ID: TF_GmC5708_1.pep
MEENFKCEQVGLIDELMQGKELAKQLCDHLLVSSSSSSSSHETNEVLIEKILSTYEKALAMLNCKADVGESKAKNGSMMDSHCPLTNGSPKSEVLEPEVKNKNVFKKXRAMSTCTEQVKVCLGTAHEGSLDDGYSWRKYGQKDILGAKFPR

SEQ ID NO: 32760 - protein, 122 aa, Glycine max
  Clone ID: TF_GmC5713_1.pep
MIIWVQRSLEDPTILVTTYEGEHNHGHQRAEISLVSNQSEALPPLKGSSPVSSPNTATIRSAVCPTVTLDLVKSGLVEFESAQKSSIQQFLVQQMATSLTRDPNFTTELATAISGKILEAQW

SEQ ID NO: 32761 - protein, 196 aa, Glycine max
  Clone ID: TF_LIB4164-057-R1-N1-D6.pep
HACRVILSSYEKALLILRCSNASTSELQGMNQATPTLLPESPLSVHGSPLREDVHGAIKDHHNSKKRKITPKWMDRVRVSCESGLEGPHEDGYNWRKYGQKDILGAKYPRSYYRCTFRSTQGCWATKQVQRSDEDPTMFDITYRGNHTCSQGNNAVLPPKSPEKHEKPAHSHNIDIHHAQASQESLAKFRSILSVN

SEQ ID NO: 32762 - protein, 130 aa, Glycine max
  Clone ID: TF_GmC1374_1.pep
CRSYYRCTSQKCGVKKRVERSFQDPTIVITTYEGQHNHHCPATLRGSAASMLSSPSFFGSSYMASSLPQDFLAQLVPSYSQINDHQSPMFHQNLSHNLHPQPQQQHQFQLSHDHGLLQDLLPSFPGKHEP

SEQ ID NO: 32763 - protein, 296 aa, Glycine max
  Clone ID: TF_GmC38338_1.pep
MSILFPRSSSAAKRKRVIRELVQGRDYATQLKFLLQKPIGPDGSVSAKELVANVLRSFAETLSNLVISGEDASQVESIDPRSEGSTESKKGSKDRRGSYKRRKTEQTWTIVAQTTDDNHAWRKYGQKEILNSQFPRSYFRCTRKFEQGCRATKQVQRIQENPDMYTITYIGFHTCKDTLKAPQMVTHSETWDSFLGPDANVPNEHYSIIGSQSQIVIQEYPNDETDPSDLTDANLWSDLKDFELSNDKPAGLKIAPENADSVYSCTGSRSLDMDFGIFSPHFCSTEDFHFDESQLL

SEQ ID NO: 32764 - protein, 192 aa, Glycine max
  Clone ID: TF_GmC143554_1.pep
YSWRKYGQKDILSAKYPRSYYRCTFRKTKGCFATKQVQRSEEDHTIFDITYRGSHTCKRNDAVLPPKSPDYTHAAPVTVKTDNITAPSASFGCMAQDNYHDLFPSLADSARAFFSTPSQTSSLSANTPESNYFVSPTFLEHEFDGVCNKPCPDSELARLVSADTSITSSPIFDFNFSLDAVGIDYPNFPFNI

SEQ ID NO: 32765 - protein, 150 aa, Glycine max
  unsure (1)..(150): unsure at all Xaa locations
  Clone ID: TF_GmC80686_2.pep
MDNNTCASSQLESEEASFEHKSETQTSKKRKMVEKTVVAVRTGENVGKLKNEGLPSDFWSWRKYGQKPIKGSPYPRGYYKCSTSKGCSAKKQVERCRTDASMLIITYTSTHNHPCPTAITTNSPQQPXELSESETTPDLSATTKEEDPRL

SEQ ID NO: 32766 - protein, 195 aa, Glycine max
  Clone ID: TF_GmC6804_2.pep
MENYSMLFPISNSSSYPISTSGVGSSQIGYNGQSSNAFLGLRPSNELLGSDDHDNGGEGGGDGDGNMLMSQISGGSNTNVSDELGGSGNSNNKKKGEKKVKKPRYAFQTRSQVDILDDGYRWRKYGQKAVKNNKFPRSYYRCTHQGCNVKKQVQRLTKDEGVVVTTYEGVHTHPIEKTTDNFEHILSQMKIYTPF

SEQ ID NO: 32767 - protein, 189 aa, Glycine max
  unsure (1)..(189): unsure at all Xaa locations
  Clone ID: TF_GmC89194_1.pep
MEDKAAIKELLEDEENPYDNTGNKQDAEKLPMLHTRQFLNMGESSSILDGNTKACAIAENAEKKMLGKNLACDDNKYNVEGEINSQITSHEAKSTEDQVSEVTCRRARVSIRARSDFSSMFDGCQWRKYGQKTAKGNPCPRAYYRCSMGTACPVRKQVQRCFKDETVLITTYEGNHNHXLPPAARPLAS

SEQ ID NO: 32768 - protein, 525 aa, Glycine max
  unsure (1)..(525): unsure at all Xaa locations
  Clone ID: TF_GmC1123_1.pep
MDKGWVSSQSLLPPTPDNTMFPLLGFPVKLSRPTMELHHDNRKLVAEVDFFSHTPPPNIVKKELDQTPLHINTGLQLLTANTRSDQSTVDDGLSSDAEDKRAKTTELAQLQVELQRMNAENKKLKEMLSHVTGNYTALQMHLVTLMQQNQQRTESTENGVAQGKVEDKNVGVGGGKVPRQFLDIGPSGTAEVDDQVSDSSSDERTRSSTPQDNNTEAGTRDGARNNNGNKXLGREESPDSESQGWGPNKLQKVNPSNPMDQSTAEATMRKARVSVRARSKHRGTXLIIISIYSSINNISNILLWLKLDINFVVLLIXVQRCADDRTILVTTYEGTHNHPLPPAAMAMASTTTAAASMLLSGSMSSADGIMNPNLLARAILPCSTSMATLSASAPFPTVTLDHHTQPITQLQFQKAWCPHSQVPFLQAQPKNFGSGAAPIAQAQALYNQSKFSAPQAPRPPLQPSQQPSLADTVSAAASAITADPNFTAVLAAAIXSSIIGSAHNSNNNNSNNNTSRTTISSFSGN

SEQ ID NO: 32769 - protein, 60 aa, Glycine max
  Clone ID: TF_5761350.pep
DNHVWRKYGQKGVLNSEFPRSYFRCGHKYDQGCLAKKQVQRDQENSNMYRTTYIGIHTCN

SEQ ID NO: 32770 - protein, 363 aa, Glycine max
  Clone ID: TF_GmC943_2.pep
MESDLSWEQNTLINELIQGMEVARKLKADLRMPYSVDSRDLLVQRILSSYEKALLILRCNASSTSELQAMSQATPTLLPESPLSVHGSPLREDVDGTIKDHQEVKHDSKKRKATPKWMDHVRVSCESGLEGPHEDSYNWRKYGQKDILGAKYPRSYYRCTFRNTQGCWATKQVQRSDEDPTVFDITYRGKHTCSQGNNAVLPPKSPEKQEKPTHSHNIDIHRAQASQESLTKFRNILSVNTDNLNNGDMAYPFTFPSTSFGCMKQDNHSLIPWALENESFLSDLYQTHLLSTTIPESNYFPSPTFQMNVFDGIYSKPHSESDINEIISTNTSATNSPIPDFNFSLDPVEIDPNFPFNTPGLFS

SEQ ID NO: 32771 - protein, 78 aa, Glycine max
  Clone ID: TF_GmC1687_1.pep
LDDGYKWRKYGQKVVKNTQHPRSYYRCTQDNCRVKKRVERLAEDPRMVITTYEGRHVHSPSNELEDSQTPFELSNFLW

SEQ ID NO: 32772 - protein, 297 aa, Glycine max
  unsure (1)..(297): unsure at all Xaa locations
  Clone ID: TF_GmC37350_1.pep
MEDKDRAASSDPTADAEFAGDTSWTLAADDSDGAYLFPGDRERSILREFVWNLEPDQPNRIGTDDGLWKPVQSSLTDSIEPVAAVPSRSNNQSISSSSSEDPPEKSTVSDDKPLEIPSKRKNKGQKRIRQPRFAFMTKXEVDHLEDGCRWRKYGQKAVKNSPFPRSYYRCTNSKCTVKKRVERSSEDPTIVITTYEGQHCHHTVGFPRGGIISHEAAFAGQLAPTMSQFYYPIQLPSRENDDYNNNTLSTISQPCQAQDETGEGSSVMMPADGSSPSQPSTDEGLLGDIVPPGMRIR

SEQ ID NO: 32773 - protein, 302 aa, Glycine max
  Clone ID: TF_GmC623_1.pep
MAVELMGFPQMDEQKAIEEAAAEGLKGMEHLLRLLSHQPSHLRTHHTDATVSNFKKLISLLNRRTGHARFRRAPLPSTSNSLAPSPPLANPVTFAPSQSQSLTLDFSKPNMFNTTNAKSMDLEFSKETFSVSSNSSFMSSAITGDGSVSNGKLGSSLFLTPPPVSAGKPPLSFAPIKKRCHDHREHSDDISGKLSGSSKCHCTKRRKNRVKKTVRVPVISSKIADIPPDEYSWRKYGQKPIKGSPYPRGYYKCSSVRGCPARKHVERAPDDPTMLIVTYEGEHRHSMQENISGGVGLGFEST

SEQ ID NO: 32774 - protein, 320 aa, Glycine max
  unsure (1)..(320): unsure at all Xaa locations
  Clone ID: TF_GmC42427_2.pep
MAVDLANIRMEENMAIQEAASAGLKSMEHLIRVLSSQIPSASSSSSNAHHHRLNLNHLDCAEITDFTVSKFKQVINLLNRTGHARFRRAPSHPSPSISPSQPQPQPQPQPQTLTLDFAKPVMVKSNPNPNPSSTDLSVSQYSKTKDTTTFSISPPMSTTTSSFLSSITADGSVSDGKIGPXILAGXKXPLXSSHRKKWYDATLSXGESSSSAHCHCSKRRKSRVKRMIRVPAISSKIADIPADEYSWRKYGQKPIKGSPYPRGYYKCSSVRGCPARKHVERAQDDPNMLIVTYEGEHRHPQPRLPETSAGAAADFVSQPV

SEQ ID NO: 32775 - protein, 140 aa, Glycine max
  Clone ID: TF_GmC652_3.pep
IQPLCIVLLQRPRIIVPPPSEVNLLDDGYRWRKYGQKVVKGNPYPRSYYKCTTQGCKVRKHVERASMDPKAVITTYEGKPNHDVPAAKTNSHTLANNSASQLKAQKFAIPDVKHSSSSRGVTGNEQRPVASLRLKEEQIT

SEQ ID NO: 32776 - protein, 100 aa, Glycine max
  Clone ID: TF_GmC581_2.pep
GLVEPRIVMQSFMDSEILGDGFRWRKYGQKVVKGNPYPRSYYRCTNIKCNVRKHVERAIDDPRSFVTTYEGKHNHEMPLKNTGTVASERDSQASLSKDKA

SEQ ID NO: 32777 - protein, 267 aa, Glycine max
  unsure (1)..(267): unsure at all Xaa locations
  Clone ID: TF_GmC193_1.pep
MDDRKVSEELVRGLEFANQLRQVMINGKDNESSATTTTPFVQSLVKNVFRSFTNTLFLLDKYPSYEVSHTTKSEDSQESCKGFTTRNKRGYXRNTQEWEEVSKTPKVDGHQWRKYGQKEILKAKYSRNYYRCTHKYDQNCQATKQVQRIQEDPPLYKTTYLSHHTCNDLLNYEIIPDSNNNSPSDTSILLSFNNTFPTPTKQECPFLSSFPSPTSVKKLEEVIPASSSRHNNNVTLPLPDPWDVMSNSAMCDSVGLDDVNLFLDFDD

SEQ ID NO: 32778 - protein, 167 aa, Glycine max
  unsure (1)..(167): unsure at all Xaa locations
  Clone ID: TF_uC-gmflLIB3275P057f01b1.pep
MTTKAEPNIQGSVNSTYQGTTANSMSKMDPESSQATADHLSGTSESEEVGDHETEVDEKNDEPDPKTRAVIILXKAEVSHTDPACSHRTVTEPRIIAHTTSEDDLLDDGYRRRKSGQTVVKGNPYTRSYYKRSAKGCKERKHVERAPTDSRAVITTYDGKHTDEALA

SEQ ID NO: 32779 - protein, 107 aa, Glycine max
  Clone ID: TF_GmC6090_3.pep
KYGQKVVKGTLHPRSYYKCTSAGCNVRKHVERASTDPKAVITTYEGKHNHDVPAARNSSPNTASSNSMPLKPHNVVPEKHPLLKDKDFGGNDQRPVHLRLKEEQIIV

SEQ ID NO: 32780 - protein, 90 aa, Glycine max
  Clone ID: TF_LIB3242-509-P1-J1-A7.pep
NTDCPFRKLFERASHDPSAFFTRYGRKHNHDVPTARNNCHYIATPACASQHTRNRPEKRDTISLNLGIGFSPPTNNTPNIQCRTTPSQPE

SEQ ID NO: 32781 - protein, 237 aa, Glycine max
  unsure (1)..(237): unsure at all Xaa locations
  Clone ID: TF_GmC1278_2.pep
MSMVKTETTSAMQSLTPENNNHRNGFQSDHKNYQPQQVQTLSRRSDDGYNWRKYGQKQVKGSENPRSYYKCTYPNCPTKKKVEKSLDGQITEIVYKGTHNHPKPQAAKRNSLSASSSLAIPHSNHGSNELPHHQMDSVATPENSSISMDDDDFDHTKSGGDEFDNDEPDAKRWRIEGENXGISAVGSRTVRXPRVVVQTTSDIDILDDGYRXWRKYGQKXVVRGNPNPRSYYKCTFP

SEQ ID NO: 32782 - protein, 107 aa, Glycine max
  Clone ID: TF_GmC1308_1.pep
ILFCFFRKNRVKKTVRVPAISSKVADIPPDEYSWRKYGQKPIKGSPYPRGYYKCSTVRGCPARKHVERASDDPTMLIVTYEGEHRHSIQTAMQENISGGVGLVFEST

SEQ ID NO: 32783 - protein, 173 aa, Glycine max
  Clone ID: TF_GmC5674_3.pep
NSARDGCEKTTEGLVNDGYRWRKYGQKLVKGNTNPRSYYRCSNPGCPVKKHVERASYDSKTVITTYEGQHDHEIPPGRTVTQNAATNTRTTATNGKAGTKSEGNTDDTGERSGLGLTSRLTEQQTGKSTTKSKAGDMVEFRVIRLSNEGPEIKLSEQQQQKDNSATKDDSVSN

SEQ ID NO: 32784 - protein, 445 aa, Glycine max
  unsure (1)..(445): unsure at all Xaa locations
  Clone ID: TF_GmC652_1.pep
MAGGGGGDRPPWKEAAPPRPTITLPPRSGSMESLFNGGFSPGPMTLLSGFLGDGDDGKSFSQLLAGAMSSPVAGAVAAGVMDSPGLFSSSQVSFGMTHQQALAQVSAQASQANSNMHIQAEHSLTQAPAAASNTTQQLMPPLTSDSWAAMTESIDHSHSEQRLQSSLLNVDKPADDGYNWRKYGQKQVKGSEFPRSYYKCTNPNCPVKKKVERSLEGHVTAIIYKGEHNHQCPHPNKCSKDTMTSNENSNMQGNVDSTYQGTSTNSMSKMDPESSQATADRLSGTSDSEEVADHETEVDEKNVEPEPKRRKAEVSXSDPASSHRTVTEPRIIVQTTSEVDLLDDGYRWRKYGQKVVKGNPYPRSYYKCTTQGCNVRKHVERTYEGKHNHDVPAAKTNSHTMASNTASQLKSHNTNPEKHNFGSRGMGGNEQQPVARLQLKEEQIT

SEQ ID NO: 32785 - protein, 148 aa, Glycine max
  Clone ID: TF_8282706.pep
QWRKYGQKIAKGNPCPRAYYRCTLAPACPVRKQVQRCADDMSILITTYEGTHNHPIPASATAMASTTSAAVSMLLSGSSTSQPTDHSFAYHANSPTLFSGVNFSLLDQPRANQVLLPTPSSHLLPTITLDLTSTPSYSLNQGNCLPSN

SEQ ID NO: 32786 - protein, 48 aa, Glycine max
  Clone ID: TF_GmC125700_1.pep
INLTALSLHSSRSYYRCSNPGCPVKKHVERASYDSETVITTYEGQHDH

SEQ ID NO: 32787 - protein, 290 aa, Glycine max
  Clone ID: TF_GmC1330_1.pep
MMALDMIDVVPRTRMEEENIAIQEAASAGLKSMEHLIRLLSPSSSLHNNLNNLNLNHLDCSEITGFTVSKFKQVINLLNRTGHARFRRSPPQAQAQAQTNPQPQPQIQQQGFSLDFVKPTILNSKPINKDETLTLSTTSSSFMSSVTNDASVSDGKIGPFLPPSAAKPPLSSAHRKKCRDAAAALSAKPSCHCSKKRKSRVKRTIRVPAISSKIADIPPDEYSWRKYGQKPIKGSPYPRGYYKCSTVRGCPARKHVERAQDDPKMLIVTYEGEHRHVLPLTSAAGVSFGH

SEQ ID NO: 32788 - protein, 507 aa, Glycine max
  Clone ID: TF_GmC5674_1.pep
MVSSDKSADQNIPSDKLQQRVSLDSDTTLSQGHDTKNDLSKPEEASILSIVVKNEEGKDSDAIACALESDQEGSTCSLPLEKPLQNPDTLSHELPRLQSSQEFPSIIREKVSKDGYNWRKYGQKHVKGNEFIRSYYKCTHPNCLAKKQLQQSNNGHITDSICIGQHNHPRPQLNSTVSVECVLPVVEQAPHKSSLATVEDKASVEHGCMPQQIQPLQSFPPAKVSPVNKLNASHLSLTKAKNQVHDNEEPESKRLKKDNTNPDVTRVDMSTRESRVVVQTSSEVDLVNDGYRWRKYGQKLVKGNTNPRSYYRCSNPGCPVKKHVERASHDSKVVITTYEGQHDHEIPPGRTVTQNAATNARTTASNGKAGTKSEGNITDDTGERSGLGSASRLTEQLNGESITKSKAGDMVEFCVISLSNEGPEIKLSEQQQQKDNSATKDDSVSNDVISHSSSGVLCRSNEQLKGEVKPISEGSKDCLNVVAVHDTRSTESEFNKQSTADAEPVQS

SEQ ID NO: 32789 - protein, 584 aa, Glycine max
  unsure (1)..(584): unsure at all Xaa locations
  Clone ID: TF_GmC666_1.pep
MDAGEALSDDPNRPNSAADAAPAPAGARYKLLSPAKLPISRSPCVTISPGLSPTSFLESPVLLSNMKVEPSPTTGSLSLLHQTAYGSMTSAASATFPVTTVCFNSTRNTXDDENSARGKPSFFEFKPHNRSNMVPADFDNHASEKSTQIDGQGKAQAFDSSPLVKNESASPSNELSLSSPVQMDCSGGSARVEGDLDELNPRSNITTGLQASQVDNRGSGLSVAADRVSDDGYNWRKYGQKHVKGSEFPRSYYKCTHPNCEVKKLFERSHDGQITEIIYKGTHDHPKPQPNRRYSAGTIMSVQEERSDKVSLTSRDGNGSYMCGQGSHLAEPDSQPELSPVATNDGDLDGLGVLSNRNNDEVDDDDPFSKRRKMDLGIADITPVVKPIREPRVVVQTLSEVDILDDGYRWRKYGQKVVRGNPNPRSYYKCTNTGCPVRKHVERASHDPKAVITTYEGKHNHDVPTARNSCHDMAGPASASGQTRIRPEESDTISLDLGMGISPAAENTPNSQGRMMLSEFGDSQTHTSNSNFNFVHTTTVPGYFGVLNNNSNPYGSRENPSDGPSLNHSAYPCPQNIGRILMGP

SEQ ID NO: 32790 - protein, 50 aa, Glycine max
  Clone ID: TF_uC-gmroLIB3258097f09a1.pep
ARIFLLYVRDRYQWRKYGKKVTRDNPSPRAYFKCSYAPSCPVNKFFCGSC

SEQ ID NO: 32791 - protein, 145 aa, Glycine max
  Clone ID: TF_GmC565008_1.pep
MMDQEVETLEAKLQRVKEDNRTLREMLETLSSKCEKLQSHLQEINNEEQEVSTKSDQSGSVLLARAEFPIAQKPSQIFVKTHPKDNSLMVKDGYQCKKYGQKKVTKDNPSPRAYYKCYLAPSCPVKKRVQRSLQDKSFLVATYEG

SEQ ID NO: 32792 - protein, 505 aa, Glycine max
  Clone ID: TF_GmC3118_2.pep
MDQRHGPQPLPESDTIGNDSHPKTQLTKETERVVESLSDAESRHRELRSSDKPCSDSNLETLGAGVTSSVETLAVQHRSDDLQGSSTAPNSGGKAESKETVESPEKETIERGAVQPLQTQTENRLQVSVCSIPLSDLSPTSVTQSLSIVSSPTVQKQKISTPKVNNTHVPEVDRKNPSGRKTLSAVSVARTSASDGYNWRKYGQKQVKSPTGSRSYYRCTHSDCCAKKIECCDDSGHVIEIVYKSEHSHDPPRKTNSIRENKFLSSSEPIVENSVPEQPIKVLKDADPSISSKESLQEAPCSTDKKRQNTSNISGNGKVILKEEHVNEPVPKKRMKKGDLTDMDSPVKPGKKSKFVVHAAGDVGISADGYRWRKYGQKMVKGNPHPRNYYRCTSAGCPVRKHIETAVDNSDAVIITYKGVHDHDMPVPKKRHGPPSAPLVAAAAPASMNSLQVKKPDSPQNKKISTQWSVDTEGELTGEALELGGEKAMESARTLLSIGFEIKPC

SEQ ID NO: 32793 - protein, 98 aa, Glycine max
  Clone ID: TF_GmC362_3.pep
GVKSTVRVPAISSKVADIPPDEYSWRKYGQKPIKGSPYPRGYYKCSTIRGCPARKHVERAPDDPAMLIVTYEGEHRHAVQAAMQENPAGVVGLVFEST

SEQ ID NO: 32794 - protein, 238 aa, Glycine max
  Clone ID: TF_GmC6782_1.pep
MEGGERGVNPNNYELQVSFANTPQAIHEMGFVQFEENQVLSFLAPSAQSQSSQLSQSLNACNGGSNTAVAAATTTATATTSGSGATIGFSHNDLVSRTCWYNNEQVRTLDPKAVNDENCTGNTSDGGNNSWWRSAGSEKNTMKVRRKLREPRFCFGIRLEVDVLDDGYKWRKYGQKVVKNSLHPRSYYRCTHNNCRVKKRVERLSEDCRMVITTYEGRHNHSPCDDSNSSEHECFTSF

SEQ ID NO: 32795 - protein, 321 aa, Glycine max
  Clone ID: TF_GmC244_1.pep
MAVEFMMGYRNDTFAEDNAVREAASGLESVEKLIKLLSHTQQQYQTTSKSSMENIDTDYTAVADVAVSKFKKVISLLGRTRTGHARFRRAPVPVPVPVASPPPSEPRVYRATPLQQIPPPTLHTHSVTDHSLIPKIERKDSSKTINFSYSNSFVSSLTAGDTDTKQPCSSSPSPATAFQITNLSQVSSAGKPPLSSSSLKRKCSSENLGSAKCGSSSSRCHCSKKSRKMRQKRVVRVPAISLKMADIPPDDYSWRKYGQKPIKGSPHPRGYYKCSSVRGCPARKHVERALDDPSMLVVTYEGEHNHTLSAAEATNLILESS

SEQ ID NO: 32796 - protein, 531 aa, Glycine max
  unsure (1)..(531): unsure at all Xaa locations
  Clone ID: TF_GmC1123_2.pep
MDKGWGLTLDTSSSQSLPLFPSNDNKMFPLLGFPVNLSRASKEDDENRKVVGEVDFFSDRNKPTPPPSHDHNVKPNIVKKEIDETPLHINTGLQLLTANTGSDQSTVDDGVSSDAENKRAKTTELAQLQXELQRMNSENKKLKEMLSHVTGNYTALQMHLVTLMQQNQQRTESTENEVARGKRMVPPRQFLDLVPSGTTEIDDQVSNSSLGERTRSTTPPSCNKNDDKDKKETTDRPHSGKLLNHTTDPSTSPEAAMRKARVSVRARSEAPMISDGCQWRKYGQKMAKGNPCPRAYYRCTMAVGCPVRKQVQRCADDRTILVTTYEGTHNHPLPPAAVWMVMASTTAAAATMLLSGSMSSADGVMNPNLLARAILPCSTSMATLSASAPFPTVTLDLTHNPKPXNFKGPGAPFQVPFLQAQPQNFGSGATPIAQALYNQSKFSGLQLSQDVGSSQLAPQAPRPPLQPSQHPSLADTVSAAASAITSDPNFTAVLAAAISSIIGGAHNSNNNNNNNSNNNTSRTTISSFSGN

SEQ ID NO: 32797 - protein, 312 aa, Glycine max
  Clone ID: TF_GmC1123_3.pep
GKVPRQFLDIGPSGTAEVDDQVSDSSSDERTRSSTPQDNNTEAGTRDGARNNNGNKSELGREESPDSESQGWGPNKLQKVNPSNPMDQSTAEATMRKARVSVRARSEAPMISDGCQWRKYGQKMAKGNPCPRAYYRCTMAVGCPVRKQVQRCADDRTILVTTYEGTHNHPLPPAAVWMVMASTTAAAATMLLSGSMSSADGVMNPNLLARAILPCSTSMATLSASAPFPTVTLDLTHNPNPLQFQRPGAPFQVPFLQAQPQNFGSGATPIAQALYNQSKFSGLQLSQECRIFSISTTSSQTTLAAKPTSLTG

SEQ ID NO: 32798 - protein, 201 aa, Glycine max
  unsure (1)..(201): unsure at all Xaa locations
  Clone ID: TF_LIB4391-036-R1-K1-E2.pep
LQKVNPSNPMDQSTAEAXMRKARVSVRARSEAPMISDGCQWRKYGQKMAKGNPCPRAYYRCTMAVGCPVRKQVQRCADDRTILVTTYEGTHNHPLPPAAMAMASTTAAAATMLLSGSMSSADGVMNPNLLARAILPCSTSMATLSASAPFPTVTLDLTHNPXPLQFQRPGAPFQVPFLQAQPQNFGSGATPFAQHFIINQN

SEQ ID NO: 32799 - protein, 300 aa, Glycine max
  Clone ID: TF_GmC94_1.pep
MENLGGSSRRKAIEELLRGRDSAQQLKSVINGTYDDGSATPFAQQLVKEVLMSFTNSLLFLHNNPTSESHHVFNVQVWDSPKSEDSQESNCKSSTIKEPRGCYKRRRTEQTWEKESEAPIDDGHHWRKYGQKEILNAKFPRNYYRCTHKFDQGCQATKQVQRVQEEPILFKTTYYGHHTCKNSANPDIILDPMSPSSSSKFLSFDNSFSTPSKQECPFLSSSNNFPSSSSVKRECKEEVPPSISSNDYLISSDLTFDSSPRHHVTLSSTLDSEYKSVDISDVLYDSAQLDFVFEPFLEIR

SEQ ID NO: 32800 - protein, 197 aa, Glycine max
  Clone ID: TF_GmC25797_1.pep
MDYYFGNLNPNPYYHHSAVVNMASPSSEFMLSDYLVLEDALVVDHHQESWSQSTETESSEKATSSDASHGFGDATSTNTNMHIKCQNSGIKGKNAEVSQRITFRTRSQLEVMDDGYKWRKYGKKTVKSSPNPRNYYKCSGEGCDVKKRVERDRDDSNYVLTTYDGVHNHQTPSTAYYSQMPLLHSNHDWALHPSANS

SEQ ID NO: 32801 - protein, 253 aa, Glycine max
  Clone ID: TF_GmC80686_1.pep
MDNNTSACAYPQLESEEASSEHKSETQTSKKRKMVEKTVVAVRVGEKVGKLKNEGLPSDFWSWRKYGQKPIKGSPYPRGYYKCSTSKGCSAKKQVERCRTDASMLIITYTSTHNHPCPTPITTKSTTTKEEDQEHIELEEEEEQRDNNNNKPSDEVTNEENFHYLQSPIRCSSQDIIIEQEDPFKLNTEKSHDRMDLLLEEEPLCFAQLKNLSASKNEELDFFDELEELPMSSSLLHFTRNIFSDERIPVGPS

SEQ ID NO: 32802 - protein, 320 aa, Glycine max
  Clone ID: TF_GmC1027_1.pep
MEKKEMAVKTEDAIGSSSFPCYNSNLYPFSNAFDFSEVDKSSLGFMELLGVQDYSPLPELPQLSTVSVQPHHSTVKVPSDNGKECSEVLNHQPATPNSSSISSASSDAVNDEQNKTLLDQAEEDDDEEEGQQKTKKQLKPKKTNQKRQREPRFAFMTKSEVDHLEDGYRWRKYGQKAVKNSPFPRSYYRCTSVSCNVKKRVERSFTDPSVVVTTYEGQHTHPSPVMPRSGVSAGYANNFGSVLPPGNYLSQYQHYHHQQQQQHLVNTLSSLGFPYNDSSSPKNAVFTQERRLCSNHGTNAFLRDHGLLQDVVPSHMLKEE

SEQ ID NO: 32803 - protein, 192 aa, Glycine max
  unsure (1)..(192): unsure at all Xaa locations
  Clone ID: TF_GmC98460_1.pep
LLAVQDYNVPLFDWLPAGVGHHPSPSPASSNVPDSSEVLNTPASPNFSSISSSSNEATVNNNSEQQSGKELQEEEGGNGGRGDNQDQDKTKKQLKAKKKKKKNQKKQREPRFAFMTKSEVDHLDDGYKWRKYGQKAVKNSPYPRSYYRCTSAGCGVKKRVERSSEDPSMVVTTYEGQHTHSCPAXARSSLGF

SEQ ID NO: 32804 - protein, 407 aa, Glycine max
  Clone ID: TF_GmC595_1.pep
MWKFNEPTKQTDFSPERTATKSEFPSIQSFSSEMAEGKPEIQSSSVPGSGYFDYTSASQSVREQKRTEDGFNWRKYGQKQVKGSENPRSYYKCTHPNCSVKKKAENFSTGHITEIVYKGQHSHPKPQSTRRTNSQSIHQPSSSCTNSGITDHSVVTLGNPQMDHFSIQEDSSASVGEEEFEQTPQTSYSGGDGDNLGPDAKRWKGDNENDGYSVSASRSVREPRVVVETTSEIDILDDGFRWRKYGQKVVKGNSNARSYYKCTAPGCSVRKHVERAAHDIKAVITTYEGKHNHDVPAARGSGKYNSNRNSQNSNISAPIRPSAVNCYSNSSSFTNSLYNNTRLPATGNQESFSLDKFKNPGSFGYSDLNRPMGSHTNHAQYTDAAYSRAKDERKDDSFLQSFLSKDF

SEQ ID NO: 32805 - protein, 351 aa, Glycine max
  Clone ID: TF_GmC608_1.pep
MAEDWDLHAVVRGCSTVTSSSVSSSSSPSSSGFASSYFHPEAAVSSSSSSYSGFNIFKGEQGISQVLSLSAYPFEARSSIEELHELCKPFFSKSQPLTLQASSPLSSLSSYSSAPPKSVSTQEKQQQRSKQAHAVTTPRSKRRKNQLKKVCQVPVENLSSDIWAWRKYGQKPIKGSPYPRGYYRCSSSKGCLARKQVERNRSDPTMFIVTYTAEHNHPAPTHRNSLAGSTRQKPLVPQTATTTEEDSDKSKSLTKPTSPATSGAEEEAPTPSQGEKSESREEKEDVMDDEEEDEFGLSDMVLSDDFFESLDELSQLTAPSVVTGDCFSDPFSAIAIPSWVASGAATASGCR

SEQ ID NO: 32806 - protein, 355 aa, Glycine max
  Clone ID: TF_GmC86629_1.pep
MEEVEQANRVAVESCHRVLSLLSQPRDQVQHRNLMVETGEAVVRFKKVVSLLHSGMGHARVRKVKNPQIPFSHQSIFLDNPNCKTINNHHFKNLQFPQTSFPDNSIQELGSTIKNSLSLGQPSLELSSNGKSPLHLTQQASSNHYHFFQQQQQQQQQRLLLQQQQQQQQQMKHQAEMMFRRNNSGINLNFDSTSCTPTMSSTRSFISSLSIDGSVANLDGSAFHLIGAPHSSDQNSQQHKRKCSARGDEGSLKCGSSARCHCSKKRKHRVKRAIKVPAISNKLADIPPDDYSWRKYGQKPIKGSPHPRGYYKCSSMRGCPARKHVERCLEEPTMLIVTYEGEHNHPKLPTQSANA

SEQ ID NO: 32807 - protein, 113 aa, Glycine max
  Clone ID: TF_15203247.pep
EFRTRQKPIKGSPYPRNYYRCSSSKGCMARKQVERSNTEPDMFVVTYTGDHSHPRPTHRNSLAGSTRSKTLVTNPPPSPGSLSCFQATPFSSSSSSPPHSPTSPEEDPRKPPI

SEQ ID NO: 32808 - protein, 404 aa, Glycine max
  Clone ID: TF_GmC121755_1.pep
LERMKVENHRLKNMLDQVNNNYNALQTHLVSLMKDQMDKEDDKQQPHQVFDGKLEEKQAGNGGGALVPRQFMDLGLATNADTNETSHSHSSSVIRSQDSPPTNNTEVASKKNGGASDEGLVFDQDKKEFGRGIEREDSPSDQGVAANNNVPKFSPPRNVDQAEATMRKARVSVRARSEAPMITDGCQWRKYGQKMAKGNPCPRAYYRCTMAAGCPVSKQVQRCAEDRTILITTYEGNHNHPLPPAAMAMAQTTSSAARMLLSGSMSSADGLMNASFLTRTLLPCSSSMATISASAPFPTVTLDLTQSPNPLQFPKQPSQFQIPFPGVPQNFANSQASLLPQIFGQALYNQSKFSGLQMSQDSDPSQLSNQSQRPPPHLADTVSAAIAADPNFTAALAAAITSII

SEQ ID NO: 32809 - protein, 163 aa, Glycine max
  unsure (1)..(163): unsure at all Xaa locations
  Clone ID: TF_uC-gmflLIB3260P022b08b1.pep
MPYDGKLHGIPKVCKIHGCITLREPYRVIETCPDIDILDDGYWRKXVGQKVTKGNPNPRSYYVCTHPRCAGNKHVERASHDLRAVITPYEGAHTHNVPAPRFSDGHFVNRALLNNVSDHTNSAYTLVLVLPVIHQCDNSLHIQRSQAAPKGPCRLTLDMLESP

SEQ ID NO: 32810 - protein, 64 aa, Glycine max
  unsure (1)..(64): unsure at all Xaa locations
  Clone ID: TF_9204323.pep
MVDEPEPKKRMNKGDLTEMDSPVXPGKKPKFVVHAAGDVGISGDGYRWRKYGQKVVKGNPHTRE

SEQ ID NO: 32811 - protein, 184 aa, Glycine max
  Clone ID: TF_GmC1119_1.pep
MDFYFGNSPPYPNNYAHNSLNMALSSPEIALSDYLMLDDYVDHQDSRSSQSTESSEKATFNDATHGFSTGATSKNNNINCKNGINENKGGVGPRIAFRTKSELEIMDDGYKWRKYGKKSVKSSPNLRNYYKCSSGGCSVKKRVERDRDDYSYVITTYEGVHNHESPFTTYYSPISFVHSDTTFK

SEQ ID NO: 32812 - protein, 146 aa, Glycine max
  Clone ID: TF_GmC421_2.pep
FRRIIALLDGLVSCCAKLVTCRSYYKCTHPGCPVRKHVERASHDLRAVITTYEGKHNHDVPAARGSGSHSVNRPMPNNASNPTNTAATAISPLQVIQHSDNSHQNQRSQAPPEGQSPFTLEMLQSPGSFGFSGFGNPMQSYMNQQQ

SEQ ID NO: 32813 - protein, 128 aa, Glycine max
  Clone ID: TF_GmC120733_1.pep
KLVKGNPHFRNYYRCTSSGCPVRKHIETAVDNSKALIITYKGMHDHDMPVPKKRHGPPSASLVAAAAPASTNNVQLKKTGLLQNQETEAQCLEDTEGELTGEALDLGGEKAIESARTLLSIGFEIKPC

SEQ ID NO: 32814 - protein, 523 aa, Glycine max
  Clone ID: TF_GmC6090_1.pep
MSTPNTDSGTAPPPRPTITLPPRPSAEAFFSAAAGASPGPMTLVSSFFGSDAAADCRSFSQLLAGAMASPMAFSAAAAAADNSGKDDDGPHKGFKQSRPMNLVIARSPVFTVPPGLSPSGFLNSPGFFSPQSPFGMSHQQALAQVTAQAVLAQSHMHMQADYQMPAVTAPTEPPVRQLSFALNEASEQQVVSCVSSVSEPRNAQLEAPELSQADKKYQPSSQAIDKPADDGYNWRKYGQKQVKGSEYPRSYYKCTHLNCVVKKKVERAPDGHITEIIYKGQHNHEKPQANRRAKDNSDSNGNVTVQPKSESNSQGWVGQLNKFSEKIPDSSVAKSDQTSNQGAPPRQLLPGSSESEEVGDVDNREEADDGEPNPKRRNTDVGVSEVPLSQKTVTEPKIIVQTRSEVDLLDDGYRWRKYGQKVVKGNPHPRSYYKCTSAGCNVRKHVERASMDPKAVITTYEGKHNHDVPAARNSSHNTASSNSMPLKPHNVVPEKHPLLKDMDFGSTDQRPVHLRLKEEQIIV

SEQ ID NO: 32815 - protein, 561 aa, Glycine max
  unsure (1)..(561): unsure at all Xaa locations
  Clone ID: TF_GmC1824_1.pep
MINPTTLPQQSLPGIEVSAQSENSFQSQSVDAVKAQTENKSGFRLQADFAESPPQKDNGIKMFSADQRAFDVVGGGNEHSTPIEEQADEGDQRGNGDSMASGVGGAPSEDGYNWRKYGQKQVKGSEYPRSYYKCTHPNCQVKKKVERSHEGHITEIIYKGTHNHAKPPPNRRSXIGSVNLHTDMQVDHPEHVEPHNGGDGDLGWANVQKGNIAGAANWKHENIEATSSASVGPEYCNQSPNLQAQNGTHLDSGEAVDASSTFSNEEDDQVTHGSVSLGYDGEGDESESKRRKLESYAELSGATRAIREPRVVVQTTSEVDILDDGYRWRKYGQKVVKGNPNPRSYYKCTNAGCTVRKHVERASHDLKSVITTYEGKHNHDVPAARASSHVNANASNAVPGQASLQTHVHRPEPSQVHNGIGRLERPSLGSFNLPGRQQLGPSHGFSFGMNQSMLSNLVMSGLGHAQAKLPVMPVHPFLAAQQQHQQRQQHQQQQQHQQQQQQHQQQQQHQQQQCAANDLGFMLPKGEPNVEAIPEHGGLNLSNGSSVYQEMMSRMPLGPHM

SEQ ID NO: 32816 - protein, 324 aa, Glycine max
  Clone ID: TF_GmC42427_1.pep
MTVDLVGAAKMGMEENIAIQEAASAGLKSMEHLIRVLSSQIPSSASSSSNAHHHRLNLNHLDCTEITDFTVSKFKQVINLLNRTGHARFRSAPSHPSPSTSLPSQPQPQPQPQPYALTLDFAKPVMLKSNPNPNPSSTDLSVSQYSKTKDTTTFSISPPVSTTTSSFMSSITADGSVSDGKIGPAIIAAGKPPLSSSHRKRCHDATLSAGKASSSAHCHCSKRRKSRVKRMIRVPAISSKIADIPVDEYSWRKYGQKPIKGSPYPRGYYKCSSVRGCPARKHVERAQDDPNMLIVTYEGEHRHPQPRLPETAAGAGGTFAAHPV

SEQ ID NO: 32817 - protein, 302 aa, Glycine max
  Clone ID: TF_GmC42742_1.pep
MANSVAFSDEIPNMSMSFPFSPAFSSSIFDMMPPPPPSSSHDPKAPNFANSFMDLLAVPADYYTPSLFDWSQNTAPTSAPPPSTTQINHPLPSPASSNVPDGSEVLNTPASPNSSSISSSSNEAAAATTANKTTGNDNEEEEDETAIDATAGREEEDHQDQDKTKKQLKPKKKNQKKQREPRFAFMTKSEVDHLDDGYRWRKYGQKAVKNSPHPRSYYRCTTATCGVKKRVERSSEDPTVVVTTYEGQHTHPCPATSRASFGFMHSEASGFGPTSGLGSAHFMLQQQQQFRDQAQAQAAMLY

SEQ ID NO: 32818 - protein, 88 aa, Glycine max
  unsure (1)..(88): unsure at all Xaa locations
  Clone ID: TF_GmC182872_1.pep
YDVNLKIKKYIFGVCDGYTRRRYGEDDVIRGXHRRSYYRCTHNNCRVKKRVERLSEDCRMVITTYEGRHNHSPCDDSNSSENECFTSF

SEQ ID NO: 32819 - protein, 230 aa, Glycine max
  Clone ID: TF_GmC373_2.pep
MDHMGDPKSIIHELLQGLELARQLQVYLHMPTSSQETRDLLIQKIISTFEKALEMVNCKGPVPAGESSHHPLGAALIRVSDSPLSSSPRSEDSDRDFKDQDPNAFKKRNTLPRWTKHIRVTPGMGVEGPLDDGYSWRKYGQKDILGALYPRGYYRCTHRNVQGCMATKQVQRSDEDPTIFEITYRGKHTCTVANNVGSSSPIPLENQEPSLNNTISQHQHQQNILQSHEQ

SEQ ID NO: 32820 - protein, 301 aa, Glycine max
  Clone ID: TF_GmC43050_1.pep
MLNEISEHYAALQNQLLLAMQQKKLSSSPRNNEDMQKDSQQNNMEKPALPSCRQFLNTGKINNRVILQEAKIVEEQAFEASCKKARVSVRARSESSLMGDGCQWRKYGQKISKGNPCPRAYYRCNMGTACPVRKQVQRCAEDESVVITTYEGNHNHSLPPAARSMACTTSAALKMFLSGSTTSSHGSTYSYSNSDLFSPLCTSTYYPSAAPSCPTITLDLTQTSKNNMKFPSAISSNHLQPFPLSLHGQPQQSEGILPSEKNLALVDVVSAAITNDPSLKAALEAAVSSIIGDSQKSLPTL

SEQ ID NO: 32821 - protein, 144 aa, Glycine max
  Clone ID: TF_LIB3167-037-P1-K1-E7.pep
NPQHYFELLFYRNYYRCSSCKGCVARKQVERSTTEPNTFIVTYTGDHKHAKPVHRNSLAGSTRTKPSTTRLSEPNESVSCPKKENACSSNSELSPMLSVSDTLENEETVSASEPDCPDMEIEPSDNDDVLIPNTGAMFDAVLLG

SEQ ID NO: 32822 - protein, 263 aa, Glycine max
  Clone ID: TF_GmC855_2.pep
MHHRRFSKLIHVADPDEPESGPEPASEAGPASPSSGEDTKTEAPSPKKRREMKKRVVTIPIGDVDGSKSKGENYPPSDSWAWRKYGQKPIKGSPYPRGYYRCSSSKGCPARKQVERSRVDPTKLIVTYAYEHNHSLPFPKSNSSAASAAVSDGAAVSPIESAARFPPEEEMTVFATDSDLELAGDAAVLLSHHHHHFGWFDDVASTGVLESPICGEVDDVAVPMREEDESLFADLGELPECSAVFRRRNIPATSAIRCGGITG

SEQ ID NO: 32823 - protein, 103 aa, Glycine max
  Clone ID: TF_LIB4281-007-R1-K1-B11.pep
MMKTENSSSMQSFSPEIASVQTNHSNGFQSDYGNYPPQSQTLSRRSDDGYNWRKYGQKQVKGSENPRSYYKCTYPNCPTKKKVERTLDGQITEIVYKGTHNPS

SEQ ID NO: 32824 - protein, 336 aa, Glycine max
  Clone ID: TF_GmC397_2.pep
MLLSLHKLNLNLSSCSSSGIYLAVMDYSSWINTSLDLNINLHRVHEELPKKQVENNFFSLDLEVKKSSVKQESAGALAEELKRVSAENKKLTEMLTEMCENYNTLRSNLMEYMRKNPDKELSSSRKRKSASSNNNSTIPMGVNGTSESSSTDEESCKNPKEDMKTKISRVYMRTEASDTSLIVKDGYQWRKYGQKVTRDNPCPRAYFKCSFAPSCPVKKKVQRSVDDQSVLVATYEGEHNHPQFSSQMEATSGSGRSVTLGSVPCTASLSTSTPTLVTLDLTKSQGSNDSKSTKPKGDSPKVPQVLVEQMATSLTTDPNFRAALVAAISGRLLHNN

SEQ ID NO: 32825 - protein, 72 aa, Glycine max
  Clone ID: TF_LIB4392-029-R1-N1-B6.pep
ARIFLLYVRDRYQWRKYGKKVTRDNPSPRAYFKCSYAPSCPVNKVSHTCFLLFPIELALQLISKVQIMLKHY

SEQ ID NO: 32826 - protein, 192 aa, Glycine max
  Clone ID: TF_GmC142606_1.pep
MESKDPPNPPPQNNPFIFTPNSMLQNPNWDPQEQSGLCDIDWGNLFSAQNGLLLNGDAKDEIECASSFSFVAQNKGVCEEEKGNKEKRKGGRMKKTTRVPRFAFQTRSADDILDDGYRWRKYGQKAVKNNTYPRSYYRCTHHTCNVKKQVQRLSKDTSIVVTTYEGIHNHPCEKLMETLTPLLKQIQFLASL

SEQ ID NO: 32827 - protein, 538 aa, Glycine max
  unsure (1)..(538): unsure at all Xaa locations
  Clone ID: TF_GmC1278_1.pep
MTTSFSDLLSSPTTHHNLGVFERPHHKSSSSDQTGSSGGVPKFKSTPPPSLPLSHHLPPIFSPSSYFNXIIPHGLSLAELLDSPVLLNSSNVLPSPTTGSFAGQGFNWKSSYGESQQHVKEEDKSFSSFSFQTQTHPPLPSSNGFQSSTGVVQTGWSFPEIAKQDGFASRMSMSMVKTETTSAMQSFNSENNNHRNGFQSDHKNYQPQQVQTLSRRSDDGYNWRKYGQKQVKGSENPRSYYKCTYPIKWIQXALDGQITEIVYKGTHNHPKPQAAKRNSLSASSLAIPHSNHGGINELPHQMDSVATPENSSISMEDDDFDHTKSGGDEFDNDEPDAKRWRIEGENEGMPAIESRTVREPRVVFQTTSDIDILDDGYRWRKYGQKVVKGNPNPRSYYKCTFPGCPVRNHVERASQDLRAVITTYEGKHNHDVPAARGSGNNSMNRSLPITNTTNNTSAATSLYTNNNSLQSLRPPAAPERTSSHFNPNMQQSSSGSFGFSGFGNPLMGSYTNQQSDNVFITRAKKEPGDDSFLDSFLC

SEQ ID NO: 32828 - protein, 93 aa, Glycine max
  Clone ID: TF_GmC351_3.pep
MRLKRVVRVPAISLKMADIPPDDYSWRKYGQKPIKGSPHPRGYYKCSSVRGCPARKHVERALDDPAMLVVTYEGEHNHTVSAADATNLILESS

SEQ ID NO: 32829 - protein, 154 aa, Glycine max
  Clone ID: TF_jC-gmro02910003h07a1.pep
ELGIRLELQSCLIFHLRGLLLSLYTRQSRTCPQKWLPVKPDLQCEPGPGSWYSDYTSASVSVPDQKIAEHGFNCRNYGQNLVKGSENPHRYYKCTHANCSVNKTVEKTLEGQMTEVVYKGHHNHPKLQSTRRTNSQSMNKPSSSCTNSWISDQS

SEQ ID NO: 32830 - protein, 167 aa, Glycine max
  unsure (1)..(167): unsure at all Xaa locations
  Clone ID: TF_jC-gmst024160g10a1.pep
GSRASVFSCTTACFDTNTVDDRKSSFFEFKPLSRSNMVPADFNNHVSKQSTQVEGPGKTQSFASSPLVESEIAVPSNELSLSSPVQKVSSSASAPVDVDLDDINHIGNTATGLQASHVEVRGXSGLSVAAEKTSDDGYNWRKYGQKLAKEVDFXQLYKCTHPTVSEK

SEQ ID NO: 32831 - protein, 471 aa, Glycine max
  Clone ID: TF_GmC581_1.pep
MHIKEAERVVIAKPVASRPTCSTFKSFSELLAGAINASPAIPSSQTTVSAIRPKTVRFKPAMNQPPSGFVFSQADTFGAALDNSSEMSPKLDTKQSLIYKPTAKLVSKTTVSLLANMGNCSTSRQQTQQPMEANFQHSIHEKFRTQPSSNLDQSITPQTEINYQSSEPSKMVQQNIEEDQKVLTSSVNCDRPSYDGYNWRKYGQKQVKGSEYPRSYYKCTHPNCPVKKKVERSFDGNIAEIVYKGEHNHSKPQLHKRNSAAGTQGSGVMSDGMVQDMWSNSHSERNEGNEVRIENTGLSMHSDYYVKVPQPNDSSLNIGATNAGGGSMENSCGLSGEYEEGSKGFEAQEDEHRSKRRKNENQSNEAALSEEGLVEPRIVMQSFTDSEVLGDGFRWRKYGQKVVKGNPYPRSYFRCTNIMCNVRKHVERAIDDPRSFVTTYEGKHNHEMPLKNTGTVASERDSQASLSKDKP

SEQ ID NO: 32832 - protein, 568 aa, Glycine max
  unsure (1)..(568): unsure at all Xaa locations
  Clone ID: TF_GmC4714_1.pep
MDGTTNSGEPRSSSVLQNTGASEDPNRSGSGQNSMARYKLMSPAKLPISRSPCITIPPGLSPTSFLESPVLLSNMKVEASPTTGSLRKLQQTVHGSMASAASATFPVTTACFDTNTVDARKSSFFEFKPLSRSNKVPAETHTSISNFKFVHKSSAPVXFGASNNSFESEISVPSRDEGPSLNLSSYPCSQSMGRILMGXKLITPQHRNRELSVTFCFLFSYFWRXYSFKGVTSHFLKVGSSSSEVKKLFERSHDGQITEIVYKGTHDHPKPQSSCRYSTGTVMYIQGERSDKASLAGRDDKASTMYGQVSHAAEPNSTPESSPVATNDDGLEGAGFVSNRNNEEVDDDDPFSKRRKMELGNVDITPVVKPIREPRVVVQTLSEVDILDDGYRWRKYGQKVVRGNPNPRSYYKCTNAGXPVRKHVERASHDPKAVITTYEGKHNHDVPAARNSSHDMAVPAATAGGQTRIKLEESDTISLDLGMGISSAAEHRSNGQGKMLHSELGETQTHASNSNFKFVHTTSAPVYFGVLNNSSNPYGSRDNRSDGPSLNHSSYPCPQSMGRILLGP

SEQ ID NO: 32833 - protein, 245 aa, Glycine max
  Clone ID: TF_GmC373_1.pep
MGVEGPLDDGYSWRKYGQKDILGALYPRGYYRCTHRNVQGCMATKQVQRSDEDPTIFEITYRGKHTCTVANNVGSSSPIPLENQEPSLNNTNIPQHQHQQNILQSHEQQQNELLLSLRKGLRVQTENLDSPEQPLVPFRFPLSTNIKNESHVFPSPVLENFTSPSYVSPAASGIGHFSVSPSGVVNSFEGNPNLANSESQINDMIPATTTTSAAPNSSTVGLEFPFDQFEFDGQNFTFDNPRFFS

SEQ ID NO: 32834 - protein, 86 aa, Glycine max
  unsure (1)..(86): unsure at all Xaa locations
  Clone ID: TF_LIB3050-015-Q1-E1-F6.pep
SDTTTERGQKPLNGSPYSRGYYTCNSVKRSPTRTHMDRTPDDPAMSTVTYEXEHRHSIPENISGRVCLRFNHSQGSCKLNLTLVHQ

SEQ ID NO: 32835 - protein, 120 aa, Glycine max
  Clone ID: TF_700874291_FLI.pep
VQRSVEDPSVLVTTYEGEHNHGQQHQTAEISINSSSKSETPRPAVSPSAMNIRSSAAAGPIVTLDLVKSKVVDINAQKSSLQQFLVHQMATSLTRDPNFTAALASAISGRILDDTSVGKR

SEQ ID NO: 32836 - protein, 178 aa, Glycine max
  unsure (1)..(178): unsure at all Xaa locations
  Clone ID: TF_GmC26844_1.pep
MEESTKRKHTNLIHELIQGKELTKQLSDHLVSSSPTSHETNELLVEKILLSYEKALTMLNWGSIMGEAKTTSGNIMDSHCSFTNGESPRSEVVDREFEHKAVFKKRKTMPRWTEXIVKICSRTGLEGSLDDGYSWRKYGQKDILGATFPRRYYRCTQRNVQRCLASXQAQRSDEDTTT

SEQ ID NO: 32837 - protein, 138 aa, Glycine max
  Clone ID: TF_uC-gmroLIB3259P236f07a1.pep
SRSRTETLKHVCENYVALQKHLNEFSQLRNANFDKEAGTVPSLKRKAESVNLFGINNYTECSTITEEETFKRPKHSTEPKVSKVLTRTDASDTGLYVRDGYQWRKYGQKVTRDNPSPRAYFKCSYAPSCPVKKKVQRS

SEQ ID NO: 32838 - protein, 286 aa, Glycine max
  Clone ID: TF_GmC94_2.pep
MKPCDHKVQLVRGIKTFLDWNMAKLGCSSRRKAIEELLRGRDCAKQLRSVINGSCEDGSSTTPSFAEQLVKEVLMSFTNSLSFLKNNPTSESHDVSNVQVCESPKSEDSQESNCKSSIIKERRGCYKRRRTEQTWEKESEAPIDDGHQWRKYGQKEILSAKFPRNYYRCTHKFDQGCQATKQVQRVQEEPILYKTTYYGLHTCKNLANPEIILDPMSPSSSSKFLSFDNSFPTPSKQECPFLSSSNLPSSVKGGVQGGGPLPQLSHHISSLLTSLLIVTRHHVLYH

SEQ ID NO: 32839 - protein, 66 aa, Glycine max
  unsure (1)..(66): unsure at all Xaa locations
  Clone ID: TF_700832484H1.pep
MTLQRVVTVPHIILEMADIPPDDYSWRKYXHKPIKGAPHPMGHYECSRVTGCPARKHVERALGDPA

SEQ ID NO: 32840 - protein, 59 aa, Glycine max
  Clone ID: TF_701123986H1.pep
AGLLKTQRPSLKGGKEIKQHRYAFQTRSHVDILDDGYRWRKYGEKSVKNNKFPRFVLLH

SEQ ID NO: 32841 - protein, 146 aa, Glycine max
  Clone ID: TF_8283852.pep
EYRSNNAEACPDAAEDVLDRSSSQSWGSSKLEEQPKTAEQLPAEQIPLRKARVSVRARSEAPMISDGCQWRKYGQKMAKGNPCPRAYYRCTMAVGCPVRKQVQRCADDKAVLITTYEGHYNHPLAAGRTGMANTTSTAATMLLSGS

SEQ ID NO: 32842 - protein, 255 aa, Glycine max
  Clone ID: TF_GmC667_1.pep
MDSKFRKKNRNVNSYTSEQDQDTDIAQENLAESPPSSTVFNIDGLVPSPTSSSKRRRAIQKRVVQIPMKETEGCRLKGESNTPPSDSWAWRKYGQKPIKGSPYPRGYYRCSSSKGCPARKQVERSCVDPTMLVVTYSSDHNHPWPPSRNHARPTKKPEPVPDPVEPEEKFADESMITTAEELGWLGEMEATSSTVLESPFMATTYHADVALIPMREEDESLFADLGELPECSVVFRQGLLAERRRYTAPWCGTTS

SEQ ID NO: 32843 - protein, 369 aa, Glycine max
  Clone ID: TF_GmC351_2.pep
MHTFFLCLILLSLSLSLLHPSIFSFSSSHGVIAPTMAVDLMTTGCSRNDNINSFTTKAEENAVQEAASGLESIEKLIRLLSQTQTQTRHQINNNSSNEIAIAMDCKVVADVAVSKFKKVISLLGRTRTGHARFRRAPLPNQNQHTQPPSEPPVFHATPLHQIPPPSLHQIPKTERNLNDSSSSKTIHFSYPSAATSFISSLTGDGAADNKQPSSSPPAAAATTTPFQITSLSHVSSAGKPPLSTSSFKRKCSSENLGSGKCGSSSSRCHCSKKSRKMRLKRVVRVPAISLKMADIPPDDYSWRKYGQKPIKGSPHPRGYYKCSSVRGCPARKHVERALDDPAMLVVTYEGEHNHTLSAADATNLILESS

SEQ ID NO: 32844 - protein, 72 aa, Glycine max
  Clone ID: TF_jC-gmXLIB3563P059ch12a1.pep
KYGQKMAMGNPCPTAYYRCTMGVGCPIGKPDQPGADDRTILVTTYEGAHNHPLPPAGVVDAVDIPSRGCGWI

SEQ ID NO: 32845 - protein, 208 aa, Glycine max
  Clone ID: TF_GmC3118_4.pep
MKMIHFLFLFALVSFTSHASVNDFCVADLKGPDSPSGYQCKPPNTVTVDDFVFSGFVAGNTTNTFNAALTSAFVTDFPGVNGLGVSAARLDIAKGGSIPMHTHPAATELLIMVEGQITAGFMTPTALYTKTLKPGDIMVFPQGQLHFQVNSGNGKATAFLAFSSANPGAQLLDLLLFGNTLPSDLVAQTTFLDVAQVKKLKARFGGRG

SEQ ID NO: 32846 - protein, 261 aa, Glycine max
  Clone ID: TF_GmC667_2.pep
MDSKFRKNNRNSYTSEQDQDTDHDVAQENIAESPPSSTVFNIDGLVPSPTPSSKRRRAIQKRVVQIPMKETEGCRLKGESNTPPSDSWAWRKYGQKPIKGSPYPRGYYRCSSTKGCPARKQVERSCVDPTMLVVTYSSDHNHPWPPSRNHARPTKKPEPVPDPVQPEPEEKFADLGGDDSMITTAEELGWLGEMETTSSTVLESPIMATGYHADVALIPMREEDESLFADLGELPECSVVFRQGLLTERRRYTAPWCGTTS

SEQ ID NO: 32847 - protein, 208 aa, Glycine max
  unsure (1)..(208): unsure at all Xaa locations
  Clone ID: TF_GmC1123_4.pep
HSGKLLNHTTDPSTSPEAAMRKARVSVRARSEAPMISDGCQWRKYGQKMAKGNPCPRAYYRCTMAVGCPVRKQVQRCAEDRTILTTTYEGTHNHPLPPAAMAMASTTAAAASMLLSGSMTSADGIMNPNLLTRAILPCSSMATLSASAPFPTVTLDLTHNQNAFQNYQRPQTPLFPSQPQDFIAGSTPPQLPQLIAQALYXQSKFSGL

SEQ ID NO: 32848 - protein, 246 aa, Glycine max
  unsure (1)..(246): unsure at all Xaa locations
  Clone ID: TF_GmC652_2.pep
GQFGITHQQMLAQISSQAVQTHSEHPFSISAVSATSSCAAQQLIPPSMPDSKVKESLDYSHSEQKLQSSVNVDNKPNNDGYNWRKYGQKHVKGSDFSRSYYKCTRPNCPVKKKLERSLEGHVTAIIYKGEHNHQRPHRSKIVKETQTSNENSVSKMDLGSSQATGEHGSGTRDSEEVHDHETEAVGKFYDSAETQKSGSRXPASLHRTVAETRIIVQTTSEVDLLDDGYRWRKYGQKVVKGNPYPR

SEQ ID NO: 32849 - protein, 93 aa, Glycine max
  Clone ID: TF_GmC1323_1.pep
LRLKRVIRVPAISSKNADIPPDEYSWRKYGQKPIKGSPHPRGYYKCTSVRGCPARKHVERAVDDSNMLVVTYEGEHNHSQITSEVANVILESS

SEQ ID NO: 32850 - protein, 222 aa, Glycine max
  Clone ID: TF_GmC127755_2.pep
MVRGGGLQSMDSDPIGSFFLHKPIVLNSFPAEDTNNKWKKLSLHHNMDATASNTKDNTIPFQVSLRCSPNNHGDGILVPRQFMDLGLAANNGTSTGIEPSSSSGGRSQDRSRSPNVEVASKELGTNDEEEKKEYGRGIEREDDSPSGHAHKVPRFSPPKDNNSVEAEATMRKARVSVRARSETPMIADGCQWRKYGQKMAKGNPCPRAYYRCSMASACPVRK

SEQ ID NO: 32851 - protein, 104 aa, Glycine max
  Clone ID: TF_LIB3051-037-Q1-K1-F6.pep
KSRAAPKCKKSKKSQNKSVVKQVTTAEGLDDAWAWRKYGQKPIKGSPYPRSYYRCSSSKGCLARKQVERSHLDPAVFLVTYTAEHSHPHPTRRNSLAGTTRKNN

SEQ ID NO: 32852 - protein, 120 aa, Glycine max
  Clone ID: TF_GmC1330_4.pep
SSAHRKKCRDAAPALSTKPSCHCSKKRKSRVKRTIRVPAVSSKIADIPSDEYSWRKYGQKPIKGSPYPRGYYKCSTVRGCPARKHVERAQDNPKMLIVTYEGEHRHVLPLTAAAGVSFGH

SEQ ID NO: 32853 - protein, 54 aa, Glycine max
  Clone ID: TF_LIB4390-038-R1-K1-B9.pep
FPLFIFRGYYKCSSMRGCPARKHVERCLEEPTMLIVTYEGEHNHPKLPTQSANA

SEQ ID NO: 32854 - protein, 225 aa, Glycine max
  Clone ID: TF_GmC855_1.pep
ICVHETIRRREMKKRVVTIPIGDVDGSKSKGENYPPSDSWAWRKYGQKPIKGSPYPRGYYRCSSSKGCPARKQVERSRVDPTKLIVTYAYEHNHSLPLPKSNSSAASAAVSDGATSSSPADSAARYPPEEEMKVFATDSDLELAGDAAVLLSHHHHHHFGWFDDVTSTGVLESPICGEVDDVAVPMREEDESLFADLGELPECSAVFRRRNIPATSAIRCGGITG

SEQ ID NO: 32855 - protein, 191 aa, Glycine max
  Clone ID: TF_GmC1329_1.pep
MGSNGVTGNPGPSYSPPGGCTGRVPLGGALAPGEIDILDDGYRWRKYGQKVVKGNPNPRSYYKCVAPGCPVRKHVERASHDMKAVITTYEGKHIHDVPLGRGNSSYSMNRNSLNNTSNNTNTSNVTAPAPIRPSALTNYSNSASFTNSLHDTKQPTSAGQEPFPMDLLLSPGSIGFSANDSFLQSFLSKNF

SEQ ID NO: 32856 - protein, 39 aa, Glycine max
  Clone ID: TF_uC-gmroLIB3259P207a09a1.pep
AEQVNICSRRGLEGSLDDVYTWTKYGQKNILIAKFPRLD

SEQ ID NO: 32857 - protein, 316 aa, Glycine max
  Clone ID: TF_GmC362_1.pep
MAVELMGFPKLDEQKAIQEAASEGLKGMKHLIRTLSNQPSHLNTELTDVTVSKFKKLISLLNRTGHARFRRAPVQYSSPHAPVHNTNASTSSIQLPPPPQNPNIPALAQFPTPAPVAVHHTPVTLDFTKPHNALLSSNAKSVELEFSKETFSVSSNSSFMSSAITGDGSVSNGKIFLAPPATSAGKRPAFKKRCHEHREHSDDVSGNSKCHCVKRRKNRVKSTVRVPAISSKVADIPPDEYSWRKYGQKPIKGSPYPRGYYKCSTIRGCPARKHVERAPDDPAMLIVTYEGEHRHAVQAAMQENAAGVVGLVFEST

SEQ ID NO: 32858 - protein, 579 aa, Glycine max
  unsure (1)..(579): unsure at all Xaa locations
  Clone ID: TF_GmC421_1.pep
MASSSGSLDTSASANSFTNFTFSTHPFMTTSFSDLLASPTDNNKPPHGGGGGLSERTGSGVPKFKSTPPPSLPLSPPPISPSSYFSIPPGLSPAELLDSPVLLNSSNILPSPTTGAFVARSFNWKSSSGGNQRIVKEEDKGFSNFSFQTQXGPPASSTATYQSSNVTVQTQQPWSYQETTKQDNFSSGKSMMKTEKSSSMQSFSPEIASVQNNHSNGFQSDYGNYPPQSQTLSRRSDDGYNWRKYGQKQVKGSENPRSYYKCTYPKCPTKKKVEXLDGQHTAIVCKVTHNHPKPQNTRKNSSNSSSLAIPQSNPIIAEIPAHPXATHKCTQMDSASEPANSSISIGDDDFEQSSQKCKSGGDEYDEDEPDAKRWKIEGENEGMSAPGSRTVREPRVVVQTTSDIDILDDGYRWRKYGQKVVKGNPNPRSYYKCTHPGCPVRKHVERASHDLRAVITTYEGKHNHDVPAARGSGSHSVNRPMPNNASNPTNTAATAISPLQVIQHSDNSHQNQRSQAPPEGQSPFTLEMLQSPGSFGFSGFGNPMQSYMNQQQQQLSDNVFSSRAKEEPRDDMFLESLLC

SEQ ID NO: 32859 - protein, 55 aa, Glycine max
  Clone ID: TF_GmC362_5.pep
KCSPVRGCPARKHVERAPDDPAMLIVTYEGEHRHPVQAPMQENPAGVVGLVFEST

SEQ ID NO: 32860 - protein, 332 aa, Glycine max
  Clone ID: TF_GmC351_1.pep
MAVDLMTTGYTRNDNISSFTTKAEENAVQEAASGLESVEKLIRLLSQTQAQAQAHHQFNNNNSSSNEIAIAMDCKAVADVAVSKFQKVISLLGRTRTGHARFRRAPLPNQHQHTQPPSEPPVLHATPLHQIPPPSLHQIPKTEKHLNDSSSKTLHFSYPSAVTSFVSSLTGDAADNKQPSPAATTTTSHFQITSLSHVSSAGKPPLSSSSFKRKCSSENLGSGKCGSSSSRCHCSKKRKMRLKRVVRVPAISLKMADIPPDDYSWRKYGQKPIKGSPHPRGYYKCSSVRGCPARKHVERALDDPAMLVVTYEGEHNHTVSAADATNLILESS

SEQ ID NO: 32861 - protein, 97 aa, Glycine max
  Clone ID: TF_LIB4390-010-R1-K1-C1.pep
LCRKMRLKRVVRVPAIILKMADIPPDDYSWRKYGQKPIKGSPHPRGYYKCSSVRGCPARKHVERALDDPAMLVVTYEGEHNHTVSAADATNLILESS

SEQ ID NO: 32862 - protein, 147 aa, Glycine max
  Clone ID: TF_jC-gmXLIB3563P026cd04a1.pep
GHVIEIVYKSQHNHDPPHKIDTTKESKLLPSSEPKEESSVPKQSTKVLNNSDPSSSPKEPLQEAPCNGDKNLENSSNVENGKIILKEKHVNDREPKRRLNNGDLDSAVKHGKKPKFVVHATEDVGISGDGYRWRKYGQKLVKGNPHF

SEQ ID NO: 32863 - protein, 228 aa, Glycine max
  Clone ID: TF_GmC5708_2.pep
IYYCRGYYRCTYRNVQGCLATKQVQKSDEDPMICEITYKGRHTCTQASHLNKTVIPPSKTKVNLLGENKHQTHQIKNQPRQEKIEQQPPETFFTFGSSSGLEVKIEDIDHKEGIFPSFCFSSPSIVGSENGDDNNSSIFSYTMIENNLMESFSPAFISPTTSDIESNTFCHWGSTGLGQSVQSSGSDITDIVSAPTSVTNSPIMDLDFFFDKIDFDTDFPLSTMELCT

SEQ ID NO: 32864 - protein, 93 aa, Glycine max
  Clone ID: TF_GmC652_6.pep
RSYYKCTTQGCNVRKHVERASTDPKAVITTYEGKHNHDVPAAKNNSHTMASNTASQLKSHNTNPEKHNFGSRGMGGNEQQPVARLRLKEEQIT

SEQ ID NO: 32865 - protein, 294 aa, Glycine max
  Clone ID: TF_GmC1067_1.pep
MEMEPTCVDTSLNLNVIPSPHIDHLAGEVLFEELRRLSSENKRLTETLNHLCESYVALQKHLSEFSQLRNANFDKEGTCAVPSLKRKPESENCVNLFGTECNTITEEETFKRPKHSTEPKVSKVLTRTDASDTGLYVRDGYQWRKYGQKVTRDNPSPRAYFKCSYAPSCPVKKKVQRSVEDPSVLVTTYEGEHNHGQQHQTAEISINSSSKSETPRPAVSPSAMNIRSSAAAGPIVTLDLVKSKVVDINAQKSSLQQFLVHQMATSLTRDPNFTAALASAISGRILDDTSVGKR

SEQ ID NO: 32866 - protein, 154 aa, Glycine max
  Clone ID: TF_LIB4204-001-Q1-K1-F2.pep
MSSSSTSFSPDQHLSPSDQLCYVHCNFCDTVLAVSVPCTSLFKTVTVRCGHCTNLLSVNMRGLLLPSANQLHLGHSFFTPQNLLEEIRNAPSTNMMMNQLPNPNDLVMSTMRGGPEETPKPPSANRPPEKRQRVPSAYNRFIKDEIQRIKAGNP

SEQ ID NO: 32867 - protein, 148 aa, Glycine max
  Clone ID: TF_10847320.pep
STLQPKESSSEQDANKTLKRHNASMMTYSDCEEEDAIPMSNVVNKPPEKRQRTPSAYNCFIKEEIKRLKAENPDMAHREAFSTAAKNWANFPPTQCKEDEESCSSQTDQHVDLDSQVDPNAVVNEEEGQGLRGRKVPKKSILERTPFE

SEQ ID NO: 32868 - protein, 182 aa, Glycine max
  unsure (1)..(182): unsure at all Xaa locations
  Clone ID: TF_jC-gmXLIB3563P040dh04d2.pep
VSVPCTSLFKTVTVRCGHCTNLLSVNMRGLLLPSANQLHLGHSFFTPQNLLEEIRNAPSTNMMMNQLPNPNDLVMSTMRGGPEETPKPPSANRPPEKRQRVPSAYNRFIKDEIQRIKAGNPDISHREAFSAAAKNWAHFXHIHFGLMPDNQPVKKANVRQEQRTCLXKDGCFAPANGGVSPY

SEQ ID NO: 32869 - protein, 185 aa, Glycine max
  Clone ID: TF_GmC4246_1.pep
MSMEMMATERVCYVHCNFCNTILAVSVPYSSLLTIVTVRCGHCANLLSVNMGASLQAFPPQDPQSQKQHLSFQEPSSKELGSSSKCSKIAPFEAVEHELPRIPPIRPTEKRHRVPSAYNRFIKEEIQRIKASNPDISHREAFSSAAKNWAHFPHIHFGLKNLKLDGNKQEKLDQGEGAEKSNGFY

SEQ ID NO: 32870 - protein, 216 aa, Glycine max
  Clone ID: TF_GmC47784_1.pep
MSSSSTSFSPDQQHLSPSDQLCYVHCNFCDTVLAVSVPCTSLFKNVTVRCGHCTNLLSVNMRGLLLPSANQLHLGHTFFTPQNLMEEIRNAPSTNMMMNQLPNPNDLVMSTMRGGPEETPKPPSANRPPEKRQRVPSAYNRFIKDEIQRIKAGNPDISHREAFSAAAKNWAHFPHIHFGLMPDNQPVKKANVRQEAEDVLMKDGFFAPANVGVSPY

SEQ ID NO: 32871 - protein, 167 aa, Glycine max
  Clone ID: TF_GmC4246_3.pep
FGHGDGPDSYVSVPCSSLLTIVTVRCGHCANLLTVNMGASLQTFPSQDTTQLQRQHLSVQEACSKELGSSSKCKSFETVDHEQQPRIPPIRPPEKRQRVPSAYNRFIKEEIQRIKASNPDISHREAFSTAAKNWAHFPHIHFGLKLDGNKQAKLDQGDGTQKSNGFY

SEQ ID NO: 32872 - protein, 75 aa, Glycine max
  unsure (1)..(75): unsure at all Xaa locations
  Clone ID: TF_LIB3107-069-Q1-K1-E1.pep
ARFLAAVXXASLWLXSXXXAFLLCVSSLLXRXXXXXXRCLFSGGRLXGLLGCCSWCSVSXVLXFXXXPXSLLRAS

SEQ ID NO: 32873 - protein, 182 aa, Glycine max
  Clone ID: TF_GmC39846_1.pep
MSSCSIDVAPEQLCYIPCNFCNIVLAVSVPCSSLFDIVTVRCGHCTNLWSVNMAAAFQSLSWQDVQGPGQCNPEYRIDTGSTSKCNNRIAMRAPTTHVTEERVVNRPPEKRQRVPSAYNQVIKEEIQKITAISPGVAFSTAAKTWAHFPHIHFGLMLESNNQVKMENVSEKHLMSRAALLNK

SEQ ID NO: 32874 - protein, 96 aa, Glycine max
  unsure (1)..(96): unsure at all Xaa locations
  Clone ID: TF_LIB4280-022-R1-K1-E5.pep
MTGCHCPAPEKRQRVPSAYNRFIKDEIQRIKSVNPDITHREAFSAAAKNWAHFPHIHFGLMPDQTVKKTNVCQQDGEEVLMKDGFYASANXGVSPY

SEQ ID NO: 32875 - protein, 113 aa, Glycine max
  Clone ID: TF_GmC47784_4.pep
AKGSAKLFNVPVCLPVQCPCVVCPAPEKRQRVPSAYNRFIKDEIQRIKAGNPDISHREAFSAAAKNWAHFPHIHFGLMPDNQPVKKANVRQEAEDVLMKDGFFAPANVGVSPY

SEQ ID NO: 32876 - protein, 302 aa, Glycine max
  Clone ID: TF_GmC51271_1.pep
PRVRPRVRTAARRRQKGRSASFFLSLSLSLSAPFFHNSIKKSISKVWWLSCPSINQSNQSRDQSSTEYKRTKKGGYPQRHPLSPHYHWSCILWLFLRRHLPPSEQLCYVHCNICDTVLAVSVPCTSLFKTVTVRCGHCTNLLPVNMRGLLMPSPTQFHLGHSFFSPSHNLLEEIPNPSPNFLMNQTNLSASNEFSMPARIAADELPRPPIMNRPPEKRQRVPSAYNRFIKDEIQRIKSVNPDITHREAFSAAAKNWAHFPHIHFGLMPDQTVKKTNVCQQDGEEVLMKDGFYASANVGVSPY

SEQ ID NO: 32877 - protein, 147 aa, Glycine max
  Clone ID: TF_GmC4246_5.pep
MSMDMMATERVCYVHCNFCNTTLAVSVPCSSLLTIVTVRCGHCANLLTVNMGASLQTFPSQDTTQRFSTVGKLQRQHLSVQEACSKELGSSSKCKTFETVDHDQQPTIPPIRPSEKRQRVPSAYNRFIKEEIQRIKASNPDISHREA

SEQ ID NO: 32878 - protein, 292 aa, Glycine max
  Clone ID: TF_GmC211_1.pep
MKIQCNVCEAAEAKVLCCADEAALCWECDEKVHAANKLASKHQRVPLSLSASHMPKCDICQEMVGYFFCLEDRALLCRNCDVSIHTANACVSDHQRFLLTGVRVGLEATERGASSSSVKSQSGEKMSDAKSSSISRNVSSLPQPSNANEVLPLQMQGVEEFPPSNFSGYTSGNVSQWPIEEFLGLNELSQYYNYMDGSSKADSGKLGDSDSSVLRSGEEDMDDDGFLGRVPDSSWTVPQIPSPPTASGLYWPKVPQYTSDSAMSVPDICFSHVRQPHHAQHNSNVSKRRRQL

SEQ ID NO: 32879 - protein, 210 aa, Glycine max
  Clone ID: TF_700980420_FLI.pep
MKIQCNVCEAAEAKVLCCADEAGLCWECDEKVHAANKLASKHQRVPLSTSSSHMPKCDICQEALGYFFCLEDRALLCRKCDVAIHTANAYVSGHQRFLLTGVRVGLEATDPGASSTSLKSDSGEKVSDSSVSRKVSTAPQPSNYNEVLPAEVGGVGEFPSAKVSFGGGSTAGNISQWTIDEFIGLNEFSQNYDYMEGSSRYCRVQIHLLS

SEQ ID NO: 32880 - protein, 321 aa, Glycine max
  unsure (1)..(321): unsure at all Xaa locations
  Clone ID: TF_GmC1848_2.pep
MKIQCNVCEAAEAKVLCCADEAGLCWECDEKVHAANKLASKHQRVPLSTSSSHMPKCDICQEALGYFFCLEDRALLCRKCDVAIHTANAYVSGHQRFLLTGVRVGLEATDPGASSTSLKSDSGEKVSDSSVSRKVSTAPQPSNYNEVLPAEVGGVGEFPSAKVSFGGGSTAGNISQWTIDEFIGLNEFSQNYDYMEGSSRVCSXCLVCMVVWFCNFFFHPSFPDESVQADGGKLGDSDSPVLRSGEEEMEEEDDYLERVPDSSWTVPQIPSPPTSSGLCWPKDHTNLYGSSDSVLFVPDISFSLIQQSQISSICLRRWRQL

SEQ ID NO: 32881 - protein, 233 aa, Glycine max
  Clone ID: TF_GmC1581_1.pep
MKIQCDVCDKVEASVFCPADEAALCHSCDRTIHRANKLATKHARFSLHYPTSKDFPLCDICQERRAYLFCQEDRALLCRECDVPIHRANEHTQKHNRFLLTGVKLSGTCLDPASSSTNYTNNNRVTGSEGRNDARSRMNRPRSSVSNEENASNSSCKVEDNVASDTGSISTSSISEYLIETIPGYCFEDLLDASFAPNGFCKKQNFDHPWAFQDQKRTSGDTMAVPFLKLVIH

SEQ ID NO: 32882 - protein, 154 aa, Glycine max
  Clone ID: TF_GmC59541_1.pep
MRKCELCNSPAKLFCESDQASLCWKCDAKVHSANFLVTKHPRILLCHVCQSLTAWHGTGPKFVPTMSVCNTCVNNNSTETCSQQNHEDDDDDGTGEDHAENDDGGVAEDDDDDDDEENQVVPWTSTPPPPASTSSNSVTTSSTRFSDVEEGGSD

SEQ ID NO: 32883 - protein, 245 aa, Glycine max
  Clone ID: TF_GmC763_2.pep
MKIQCDVCNKQQASLFCTADEAALCDGCDHRVHHANKLASKHQRFSLSHPSAKHFPLCDVCQERRAFVFCQQDRAILCKECDVPVHSANDLTKNHNRFLLTGIKFSALDSPSTPPKPAGGNSLTNQQPQQQTGFTGSSISEYLINTIPGMEFEDFLDSHSLPFACSKNSDDMMLSMFGEGNMVSFSAGGIWVPQAPSSVQMDQQSGYKDTWETSIRSSFGDDSLLVPQMTPPSNVFNNKRSRLLW

SEQ ID NO: 32884 - protein, 212 aa, Glycine max
  Clone ID: TF_LIB4167-008-Q1-K1-H10.pep
MSGAEARPCDYCGNSTALLYCRADSAKLCFSCDREVHSTNQLFSKHTRTLLCDACDDSPATILCSTDTSVLCQNCDWENHNPALSDSLHERRPLEGFTGCPSVSELLSIVGFSDISKKSLLFSPQGSVADGFFGASEIEGLSDMFVWDAPSFVTLDDLISSSPSSHSFQAMKVPPLPKNRKAACGQHKEEILSQLRELPSLSLWTLNHMCNR

SEQ ID NO: 32885 - protein, 265 aa, Glycine max
  Clone ID: TF_GmC763_1.pep
MKIHCDVCNKHQASFFCTADEAALCDGCDHRVHHANKLASKHQRFSLTHPSAKHFPLCDVCQERRAFVFCQQDRAILCKECDVPIHSANDLTKNHSRFLLTGIKFSASATPYDYSSPPPPPPPPPKRNPVLDSPSTPSPPKPGGNSLTNEEEPGFTGSSISEYLINSIPGMKFEDFLDSHSLPFACSKNSDDMLSLFGEGNMVSFSPGGFWVPQAPPSSVQMDRQSGYRETREGSIRSSFGDDNFIVPQMSPPSNVSNKRSRLLW

SEQ ID NO: 32886 - protein, 349 aa, Glycine max
  Clone ID: TF_GmC830_1.pep
MSGEARSCDYCGHSTALLYCRADSAKLCFSCDREVHSTNQLFSKHTRTLLCDACDHSPATILCSTDTSVLCQNCDWEKHNPALSDSLHERRPLEGFTGCPSVSELLSIVGFSDISKKSLLFSPQGSVADGFFGGEIEGLSDLFVWDAPSFVTLDDLISSSPSSHSFQAMEVPPLPKNRKAACGQHKEEILSQLRELAKSEPLDLEPYVSSGNLSSGFEREPEADIFPSHEWHRESSEPMYQVVPPDPLMRTYTEEIPFKHSTSAVGETQTYGDNGGKPSISLKSETLSTTPKAAACELTSQERDSALLRYKQKKKTRRFDKHIRYESRKVRAESRVRVKGRFAKMEHEH

SEQ ID NO: 32887 - protein, 172 aa, Glycine max
  Clone ID: TF_GmC1095_2.pep
MKKCELCKVPARIFCESDQASLCWDCDAKVHSANFLVARHVRTLLCRTCRSPTPWKASGASLAHAASVCDRCAAAEETEESEAGNDDEPDTEDDDDVDNQVVPWSSTPPPPPPSSSSGSECSECKNNVASFSASEQETTTSSLKRQREDDDDASSDPDPQVLRRVGRLTEVA

SEQ ID NO: 32888 - protein, 241 aa, Glycine max
  Clone ID: TF_GmC998_2.pep
MKGKTCELCDQQASLYCPSDSAFLCSDCDAAVHAANFLVARHLRRLLCSKCNRFAGFHISSGAISRHLSSTCSSCSPENPSADYSDSLPSSSTCVSSSESCSTKQIKAEKKRSWSGSSVTDDASPAAKKRQRSGGSEEVFEKWSREIGLGLGLGVNGNRVASNALSVCLGKWRWLPFRVAAATSFWLGLRFCGDRGLASCQNLARLEAISGVPVKLILAAHGDLARVFTHRRELQEGWGES

SEQ ID NO: 32889 - protein, 310 aa, Glycine max
  Clone ID: TF_GmC1833_1.pep
MASKLCDSCKSATATLYCRPDAAFLCGACDSKVHAANKLASRHPRVVLCEVCEQAPAHVTCKADAAALCLACDRDIHSANPLASRHERIPVTPFFESVHSVKASSPINFHHRFFSDADADADVSTEEAEAASWLLPNPKTDLNSSQYLFSETEPVPYIDLDYAAMDPKTEQKSSATADGVVPVQSNFEPFTYGYKYNTTLSQSQSHMSQSVSSPSSMEVGVVPDGNTMSEISNCSYSKVAPVTVTAQFSAADREARVLRYREKRKNRKFEKTIRYASRKAYAETRPRIKGRFAKRTDADPLAGYGVVPSC

SEQ ID NO: 32890 - protein, 177 aa, Glycine max
  Clone ID: TF_GmC1095_1.pep
MNKCELCKVPARIFCESDQASLCWDCDAKVHSANFLVARHARTLLCRTCRSPTPWKASGASLASAVSVCDRCAASEEPEESEAGNDDEPDTEDDDNDDEDGDNQVVPWSSSPPPPPPSSSSGSEWSECKNDDASISASEQETTTCSLKRQREDDDDASSDRDPRVLRRVGRLNGGCV

SEQ ID NO: 32891 - protein, 235 aa, Glycine max
  unsure (1)..(235): unsure at all Xaa locations
  Clone ID: TF_GmC115_1.pep
MKIQCDVCERAPATVICCADEAALCAKCDVEVHAANKLASKHQRLLLQCLSSKLPTCDICQDKPAFIFCVEDRALFCQDCDEPIHSAGSLSANHQRFLATGIRXVASSSNCTKDNEKSHLEPPNRSAQQVSAKIPPQQVPSFTSSWAVDDLLELTRLXNHPEKKESLXLQEVEWLTGCGYFWLNEFCSXEALAAAEVPQLPETHNSSSVASYKTSKSYMSHKKPRIEVLNDDDDD

SEQ ID NO: 32892 - protein, 238 aa, Glycine max
  Clone ID: TF_GmC115_2.pep
MKIQCDVCEKAPATVICCADEAALCAKCDVEVHAANKLASKHQRLLLQSLSNKLPRCDICQDKPAFIFCVEDRALFCKDCDEPIHLASSLSANHQRFLATGIRVALGSNCTKGNEKGHVEPSKPKAQEVPAKIPSQQVPSFTSSWAVDDLLELTDFESPDKVQKQSLEFGELEWLADVGLFGEQFPHEALAAAEVPQLPMTSSVGSHKAPKSLLSYKKPRIEVLDEDDDEHFTVPDLG

SEQ ID NO: 32893 - protein, 238 aa, Glycine max
  Clone ID: TF_GmC115_3.pep
MKIQCDVCEKAPATVICCADEAALCAKCDVEVHAANKLASKHQRLLLQCLSNKLPRCDICQDKPAFIFCVEDRALFCKDCDEPIHLASSLSANHQRFLATGIRVALGSNCTKGHEKGNMEPSNPNAQEVPVKTPSQQVPSFTSSWAVDDLLELTDFESPDKKQSLEFGELEWLADAGLFSEQFPHEALVAAEVPQLPVPHTSSVASHKAPKSLVSYKKPRIEVLDEDDDEHCTVPDLG

SEQ ID NO: 32894 - protein, 186 aa, Glycine max
  Clone ID: TF_GmC1732_1.pep
MRTLCDACESAAAIVFCAADEAALCRACDEKVHMCNKLASRHVRVGLASPSDVPRCDICENAPAFFYCETDGSSLCLQCDMIVHVGGKRTHGRYLLFRQRVEFPGDKSSHAENPASQPLEPGEAKRGQNPLPKLKMGEKQQNHKMPMVPTPGPDADGHAKMESKMIDLNMKPNRIHEQASNNQKHP

SEQ ID NO: 32895 - protein, 186 aa, Glycine max
  Clone ID: TF_GmC272_1.pep
MVSAAAFYIKRVQPEVLYVVSYVGYRLHCIAKLMMPNLFKKLPSSKLDYYYYYYHYPIELLKMCKGAEGEKQHGFCSSYLHKECATRSATCCELCGLQASLYCQADDAYLCRKCDKRVHEANFLALRHIRCFLCNTCQNLTRRYLIGASIEVVLPANINWTIGNLPSNRGIHRKCSRMHNNLSLLL

SEQ ID NO: 32896 - protein, 278 aa, Glycine max
  Clone ID: TF_GmC1358_1.pep
MKIQCDVCNKHEASVFCTADEAALCDGCDHRVHHANKLASKHQRFSLLRPSPKQHPLCDICQERRAFTFCQQDRAILCKECDVSIHSANEHTLKHDRFLLTGVKLSASAMLRSSETTSDSNSNPSLLNFSHQTTLLPPSSTTTTTTSNNNNNKVAVEGTGSTSASSISEYLIETLPGWQVEDFLDSYSVPFGFCKNDEVLPRFDGEMEGHLSSFSTENMGIWVPQAPPTLMCSSQMDRVIVHGETNIKGSSRSRLKDDNFTVPQISPPSNSKRARFLW

SEQ ID NO: 32897 - protein, 276 aa, Glycine max
  unsure (1)..(276): unsure at all Xaa locations
  Clone ID: TF_GmC1358_2.pep
MKIQCDVCNKHEASVFCTADEAALCDGCDHRVHHANKLASKHQRFSLLRPSHKQHPLCDICQERRAFTFCQQDRAILCKECDVSIHSANEHTLKHDRFLLTGVKLAASAMLRSSQTTSDSNSTPSLLNXFTSNYSTSSSPPPPPXNNNNNKVAVEGTGSTSASSISEYLIETLPGWQVEDFLDSYFVPFGFCKNDEVLPRLDADVEGHMGSFSTENMGIWVPQAPPPLVCSSQMDRVIVQSETNIKGSSISRLKDDTFTVPQISPPSNSKRARFLW

SEQ ID NO: 32898 - protein, 293 aa, Glycine max
  Clone ID: TF_GmC1848_3.pep
MKIQCNVCEAAEAKVLCCADEAALCWECDEKVHAANKLASKHQRVPLSTSSSHMPKCDICQEALGYFFCLEDRALLCRKCDVAIHTANAYVSGHQRFLLTGVRVGLEAIDPGASLTSLKSDSGEKVSDTKSSSVSRKVSTVPQPSNYNEVLPIEVGGVGEFPPAKVSFGGGSTDGNISQWTIDEFIGLNEFSQHYDYMEGSSRADGGKLGDSDSPVLKSGEEDMEEEDDYLERVPDSSWTVPQIPSPPTASGLCWPKDPQYSSDSVLFVPDISFSLIQQSQISSICLRRWRQL

SEQ ID NO: 32899 - protein, 257 aa, Glycine max
  Clone ID: TF_GmC127847_1.pep
MKVNKEKEKELSSSSNNNSLDDETAVTVALHLGLPSTTIASSESADLASSLYSDKEEEEEKVALMLRGILLSNRINRGQYWIPTSSQILIGPTQFPCPLCFKTFNRYNNMQMHMWGHGSQYRKGPESLRGTQPTAMLRLPCYCCAPGCKNNIDHPRAKPLKDFRTLQTHYKRKHGIKPFMCRKCCKAFAVRGDWRTHEKNCGKLWYCSCGSDFKHKRSLKDHIKAFGNGHKAYGIDSCLDQDDEAGSEIEQENNESF

SEQ ID NO: 32900 - protein, 459 aa, Glycine max
  Clone ID: TF_GmC4128_1.pep
CEICNKGFQRDQNLQLHRRGHNLPWKLRQRSNKEVRKKVYICPEQTCVHHDPARALGDLTGIKKHFSRKHGEKKWKCEKCSKKYAVQSDWKAHTKTCGTREYKCDCGTLFSRKDSFITHRAFCDALAEESARLTSVTTTNLNFKSEEGGNNVMNSQQHGLGGHGLIGAQSLQNVSGIPQFGSHGFRLDFNGMEQQIRPSLSLWLNQGNHQMNSNNNNINSNNNSASDAGPNYMSSSGLPEIVQMAHANALMGCSSSMVSNFGGVHAGSNSSSANLSLGKRGEACGSTVVDLASIYNNSEGQNKNSKPASPMSATALLQKAAQMGSTRSTNPSIFSGSFGVINSPSSQTTSLNNNNNGGAAMMLASNTSTAAANANDFSSLRHSSNSFDQLVMQTNAQLQSEPVKLKLHSNGVENNLTRDFLGVSGGGGGGGGPQFLPQELAKFASMGSPMGLSQFTSNQ

SEQ ID NO: 32901 - protein, 318 aa, Glycine max
  Clone ID: TF_GM433K20.C25.o1.fg.pep
MPNATEQFSNINSIESLHVSLRNLSQLSTRMDSVQSFVSQSIQSHTLLTHHQMNIVSNEILTAIRHVITNGVALVAASENALPLSETPTLDSPNNNDDDNVVELDAMELLAKHLHFCEVCGKGFTRDANLRMHMRAHGDEFKTPEALANKARGETRLKATRFSCPLEGCNRNKTHKKFRALKSVFCLRNHFKRSHCPKTLLCERCRKKSFAVLSDLRSHVKQCRGEATWKCSCGTTFSRKDKLLGHVALFEGHSPMLGEERDTVVAAAAEGLPEGFFDGLDEFGFGSIQNNSSQEEHLALGLPTNNLDAWEFSFSNLI

SEQ ID NO: 32902 - protein, 353 aa, Glycine max
  unsure (1)..(353): unsure at all Xaa locations
  Clone ID: TF_GmC48528_2.pep
MSNSNCNPTRILHSQSQDPNTTTADPHVLLQNLSLVRTRMDSLQHFLSQSINTNTPLAVDQIAMVSSQIVSSIHQLIVNGSALVSYSQNSTAASGAPDPPLYPKKPEPEPSVADKAKQILDSKFGPLEDDDDDDGGAEDFDDGSGIVELDAIEILAEHMHFCEICAKGFRRDSNLRMHMRAHGEQFKTVEALAKPSETTAQRGATRFSCPFEGCNRNSXHRRFRPLKSVICVKNTSSGPLPEDDTCERXRKKHFSVLSDLRNHSKHCGGEARXKCTCGTTFSSKDKLFGHIAMFEGHALALVCDKEGKGKQMVEDDKDPMLMSESGFELNDCFLDQEFPEGFFDDFGSIDDYC

SEQ ID NO: 32903 - protein, 112 aa, Glycine max
  Clone ID: TF_GmC73788_1.pep
MTEPQNPSPLTHSPALEITPQPLLPPKRKRSLPGMPDPDAEVIALSPKTLLATNRFVCEICNKSFQRDQNLQLHRRGHNLSWKLTQRGSTEPRKKAYVCPEPCCVHHNPARA

SEQ ID NO: 32904 - protein, 93 aa, Glycine max
  Clone ID: TF_GmC2530_12.pep
MAAASSSTPFLGIREESPQITTHHQPSTVSPTTAPQKKRRNQPGTPYPDAEVIKLSPKTLMATNRFICEVCNKGFQREQNLQLHRRGHNLPWK

SEQ ID NO: 32905 - protein, 93 aa, Glycine max
  Clone ID: TF_GmC2530_6.pep
MAASSSSASLFGFREEDQNQMKQQHSLTPSSSTTPAAPPPQKKKRNQPGTPYPDAEVIALSPKTLMATNRFICEVCNKGFQREQNLQLHRRGH

SEQ ID NO: 32906 - protein, 96 aa, Glycine max
  Clone ID: TF_GmC150983_1.pep
DEINQVWQAATTRDGVGQSSGSGNRNDHQVEQCPQCGSKFSSVTALVDHVQKVHERNGNRLGVKKIDACPKCSRGFLDPVSLVEHVERDHGGGSRA

SEQ ID NO: 32907 - protein, 100 aa, Glycine max
  unsure (1)..(100): unsure at all Xaa locations
  Clone ID: TF_GmC2530_11.pep
MAAPFSAASLFAIREEDQNQMKQQHSSTPSSSTTPAAPPPQKKRRNQPGTPYPDAEVIALSPXTLMATNRFICEVCNKGFQREXNLQLHRRGHNLPWKLK

SEQ ID NO: 32908 - protein, 121 aa, Glycine max
  Clone ID: TF_LIB4281-040-R1-K1-G1.pep
PRVREFLPENTNQRIVGISNSCLYLFIRKNVRSRRIEERPKYKDIRRYYCEYCGICRSKKTLITSHINLHHKEEYEKARAKRDPEAEASKSNTCEECGATFKKHAYLLQHMQSHSLEESNL

SEQ ID NO: 32909 - protein, 370 aa, Glycine max
  Clone ID: TF_GmC168_4.pep
CLHHDPCHALGDLVGIKKHFRRKHSNHKQWVCERCSKGYAVQSDYKAHLKTCGTRGHSCDCGRVFSRVESFIEHQDACNMGRLRPESQPLQPSACLSRTASSPSPSSETNFSTAPWPTRMIIPKPSEPPTIFMNNPITAITTAETSSKSNNKLLHPNLDLQLSTPTTTNNTSNVANRIDAAISPKRDHHHHHENHSTHLQLSIGSSDMSEKNESNRNSSEKSSNSNINDQNNNNKQSNNMALLRVQEQAREHLRIAMAEKAYAEEARKQAKRQIELAEQEFTNAKRIRQQAQAELDKAYSLKEHAMKQINSTMLQITCHGCKQQFQARNAATTPDENSLVLSYVSSAITTEGGGEVENDNNAKDHGKDNN

SEQ ID NO: 32910 - protein, 122 aa, Glycine max
  Clone ID: TF_GmC320119_1.pep
SLKIPNGVKNNMCSTTTTTTKAKVHECSICGAEFSSGQALGGHMRRHRTLVNASLATSMSGGNVVGVGGNNEFQEAKKPLKLDLNLPALPEDDHRESKFSFQQREKNVIVFSKQSSLVDCHY

SEQ ID NO: 32911 - protein, 150 aa, Glycine max
  unsure (1)..(150): unsure at all Xaa locations
  Clone ID: TF_GmC331407_1.pep
RSHTGTSTRDCQYCGRTFSRNDVLQRHLKTHVGHQVGDGRPRASPSPSIAPEVPDSRSIIHQTPQIQQDQIYPQDPLSANTNLTVQAGPSTGDSAITGPVYTTQQDEAWRILHGLVQATQPVSAPSYSLKQDVINPFPDMFSNQAAXSWD

SEQ ID NO: 32912 - protein, 111 aa, Glycine max
  Clone ID: TF_GmC1674_1.pep
MYNGCSDDSAYGSDENSTDTDSYPAPKAHSNRNNLSVQKGKKKKKLKSKKSKAHECPICNKIFRSGQALGGHKRSHFVGGSEENTLVIRPSAPPAAVPCLIDLNLPAPVDE

SEQ ID NO: 32913 - protein, 463 aa, Glycine max
  unsure (1)..(463): unsure at all Xaa locations
  Clone ID: TF_GmC135_1.pep
IFDVPKTMSNLTSASGEASASSGNRTEIGTDYSQQYFAPPLSQAQPPPLKKKRNLPGNPDPEAEVVALSPKTLLATNRFICEICNKGFQRDQNLQLHRRGHNLPWKLKQRSSNEIIRKKVYVCPEASCVHHDPSRALGDLTGIKKHFCKKHGEKXKWKCDKCSKKYAVQSDWKAHSKTCGTREYRCDCGTLFSRRDSFITHRAFCDALAEESSRSVTGIGIVANSTSTQPTAAAASHQQDIIHGNSNNFSLKKEQQAGFRPPWIGQPSPSSASSFLVSHQENPNPRGGGPIPTLLPPYQTAPHMSATALLQKASHMGATMSKTGSMIGTHQQQAHVSANAALNLSSRDHQMTPTLHGLVPFGNKAVPAVGNGVSPSLLHHIIDSFSSPFEGTSFEDTFGGAGGDAMTKTTTADDGARGNNNEALTRDFLGLRPLSHTDILNIAGMGSCINSSQHNQTPNPWQG

SEQ ID NO: 32914 - protein, 294 aa, Glycine max
  unsure (1)..(294): unsure at all Xaa locations
  Clone ID: TF_GmC135_2.pep
MEMKGFMFYQQQQQQQIVEENMSNLTSASGEASASSGNRTEIGTSYMAPPPTQIQPPKKKRNLPGNPDPDAEVIALSPKSLLATNRFICEICNKGFQRDQNLQLHRRGHNLPWKLKQRTSKEVRKKVYVCPEPSCVHHDPSRALGDLTGIKXHFCRKHGEKEWXCDSAQEYAVQSDWKAHSKTCGTREYRCDCGTLFSRRDSFITHRAFCDALAEESARAIANPLLPPQQQQSSSSHMSTLQTQFNPQNLHAFPLKKEMPPWLGPPATVVVDHHLSSSSSIMFSPPHQENDNPP

SEQ ID NO: 32915 - protein, 188 aa, Glycine max
  unsure (1)..(188): unsure at all Xaa locations
  Clone ID: TF_GmC23433_3.pep
MSNITSCDSGSFSTENTREDAAVKQQQSEMLGQFHSPHSHTSTTTTNNSNGSNTNSQPPAPVKKKRSLPGNPDPSAEVIALSPTTLMATNRFICEICNKGFQRDQNLQLHRRGHNLPWKLKQRTSTEIRKMIYXVCPDXPCVHHNPARALXGDLTGIKKHFCRKHGEKNWICDKCSKXYAVQSDWKAH

SEQ ID NO: 32916 - protein, 132 aa, Glycine max
  Clone ID: TF_GmC124792_1.pep
MNSEKPVSPEISSEENDHDQEDDTGGTKRSYECTFCKRGFTNAQALGGHMNIHRRDRAKAKQFTLDASPSVNKFNSNNNDSMALPFVSEIMNQPTRPNYSPLESQMNFHPPHAFYYEFCNSRSQPFSLNNQE

SEQ ID NO: 32917 - protein, 135 aa, Glycine max
  unsure (1)..(135): unsure at all Xaa locations
  Clone ID: TF_6847267.pep
DNHNHDYCDTTSTXFXXXXSXXLYNNNNSSSNXRMSTINAKCKVHECSICGAEFSSGQXLGGHMRRHRNFGSAPTCGAINANRESKKHNKDVLNLDLNLPAPEDDHHRESKLFPFQAKEKVIVFSATSSLVDCHY

SEQ ID NO: 32918 - protein, 98 aa, Glycine max
  Clone ID: TF_5770686.pep
MSYWNFPFTLQRKMEFNSQNPNQSEIRWSSDDQAGPGQVKYSCSFCQRGFSNAQALGGHMNIHRRDRAKLKQSAEEKLLSLDISIKTTGDPNDPSDLE

SEQ ID NO: 32919 - protein, 149 aa, Glycine max
  Clone ID: TF_GmC77129_1.pep
MLRNMDEGEIMTNIAFPQNLTASAASSDHNNPPPSLKRKRNLPGNPDPEAQVIALSPKTLMATNRFLCETCGKGFQRDQNLQLHRRGHNLPWKLKQRTGKEARKRVYVCPEKSCVHHDPSRALGDLTGIKKHFCRKHGEKKWKCEKCSK

SEQ ID NO: 32920 - protein, 77 aa, Glycine max
  Clone ID: TF_700743676H1.pep
TKKVLSLMERYKCKLCSRTFSNGIALGGHMKAHLATLPLPPQNQQPPLSPSAAASFSSNSSSEQDQATHGEKSLIYG

SEQ ID NO: 32921 - protein, 154 aa, Glycine max
  unsure (1)..(154): unsure at all Xaa locations
  Clone ID: TF_jC-gmro02910037d11a1.pep
MLEKMDDGEISNAFPHQNPSTAASNNQPPTLKRKRNLPGNPDPEAEVIVLSPKTLMATNRFVCEICLKGFQRDQNLQLHRRGHNLPWKLKQRTTKEVRKRVYXCPEKTCVHHHPSRALGDLTGIKKHFCRKHXEKKWKCEKCXKRYAVQSDWKH

SEQ ID NO: 32922 - protein, 166 aa, Glycine max
  Clone ID: TF_GmC38653_4.pep
NPKSVPHFLQRALPSHKSLVVCPLDIWLTRGIFNFPHIIPNMDPHMTIVATPFKKHLMTELALKLAILNYNSISNRRTKPVPPCRPLVKGQQVLQVQILLIEAHVALATFQQVMNLHIRKIFNPQQGNLLHSLISSRQTRHSHVHSNNLHLILIGSSSSRIIIGRQ

SEQ ID NO: 32923 - protein, 254 aa, Glycine max
  Clone ID: TF_GmC71690_1.pep
MAMEVEQNQNHQLGFPFWKPLRRRFGPESPFFAHGNLERELLAKQLALELTEEKQQLEKWMQEEEGREVFCPIVGCGARLTSMEDFENHYNARHTASCSVCSRVYPTSWLLSIHVSEVHDSFFQAKVARGYDMYECLVERCGLKFKSYNSRQQHLVDKHKFPTSFEFFKKAKPSKKHRLKSQRKQAVCKEDSSGMMEVENASMDDLVSAVSKLNTSDSTPSSISFGRRHKGLSFVPRAVQRGGGSNSTASVTKK

SEQ ID NO: 32924 - protein, 183 aa, Glycine max
  Clone ID: TF_10846993.pep
GSNKEVRKKVYICPEKTCVHHDAARALGDLTGIKKHYSRKHGEKKWKCEKCSKKYAVQSDWKAHTKTCGTREYKCDCGNLFSRKDSFITHRAFCDALADESSRLTSVASTSLNFKSEDATMINTQASLSTRGLITDHGMQNVSQFGPHGFRLMNMGTDQQRPNLSLWLNQGDHHINNPLDVAL

SEQ ID NO: 32925 - protein, 123 aa, Glycine max
  Clone ID: TF_GmC910_2.pep
MMTVLPLPVVTKQKLSFNLFMVLCQQKSNLDKHKKAVHLNVKPFACGFPDCGMRFAYKHVRDNHEKTAKHVFTLGDFEEADEEFRSRPRGGRKRTCPTVEVLIRKRVTPPSQLEHWLFMQDSE

SEQ ID NO: 32926 - protein, 94 aa, Glycine max
  Clone ID: TF_GmC1644_3.pep
SGCCIVVVCKVLVMDRHKCKLCSRSFSNGRALGGHMKAHLASLPLPLPPKLHSCFSSSDSEQEQSLRENPKKTLRILDPEDRESETESNKNPTR

SEQ ID NO: 32927 - protein, 358 aa, Glycine max
  unsure (1)..(358): unsure at all Xaa locations
  Clone ID: TF_GmC58470_1.pep
MADPYSNFFSSSSPLFRFNHNQYFPSSNPSPQHHNHNFINHTKTNDTTTTTAFFHYHQHQTTTAFSSFPPSPPLREELPLLKLSPTKQDEEEVEDLVSNCTGGAMDVEERIHLKEELEDDEDGSTSVTVALHIGLPSPSAAEMASVLSSSSHEITDKDQHGDHGAAEDSSSAGFRLNKGQYWIPTPSQILIGPTQFSCPVCCKTFNRYNNMQMHMWGHGSQYRKGPESLRGTQPTGMXRLPCYCCAPGCRNNIDHPRAKPLKDFRTLQTHYKRKHGIKPFMCRKCGKAFAVRGDWRTHEKNCGKLWYCICGSDFKHKRSLKDHIKAFGSGHAAYGIDGFEEEDEPASEVEQDNDDSTQ

SEQ ID NO: 32928 - protein, 192 aa, Glycine max
  unsure (1)..(192): unsure at all Xaa locations
  Clone ID: TF_LIB4164-053-R1-K1-F8.pep
MMSQEAIPAPSNNNNLRDSTVQLHEPNSNPNPNPNSVKRKRSLPGTPYPNAEVIALSPKSLMATNRFICEVCHTGFQRDQNLQLHRRGHNLPWKLRQRNREDVANKKVYVCPEKTCVHHDPCRALWDLTGIKEHFMXKHGAKKWXCEKCSKKHAVQSDWIAHSKMCRTTQYRCDCGTIFFMKDSFATHMAFV

SEQ ID NO: 32929 - protein, 259 aa, Glycine max
  Clone ID: TF_GM169K08.C11.o2.fg.pep
MEESQYLLWIKRKQILKSHIQQPFGTSNNNNSSSWEERAFAEDAARILGGCIWPPRSYSCNFCKREFRSAQALGGHMNVHRRDRARLKQSLSHHNEALQHHQKNDCTVATSKVSSSRASTISTQEICSHQPTMSLYSSLIGWGHHHHMESPDSEPKGQVNAREEFLKGLGCNDYVETSLSVGQSAVFGQKLPTTESCGDESISYKRSKTSMPPLPGVFLKPCSNDRNLTFQSAEFVLGLKPGMEDLDLELRLGKPQKVI

SEQ ID NO: 32930 - protein, 125 aa, Glycine max
  Clone ID: TF_GM169K08rgnG6.C1.o1.ma.pep
MEESQYLLWIKRKQILKSHIQQPFGTSNNNNSSSWEERAFAEDAARILGGCIWPPRSYSCNFCKREFRSAQALGGHMNVHRRDRARLKQSLSHHNEALQHHQKNDCKSSSAQFSEENFNFFLSSR

SEQ ID NO: 32931 - protein, 202 aa, Glycine max
  Clone ID: TF_GmC5902_1.pep
QVEDDDDSWEVRAFAEDTRNIMGTTWPPRSYTCTFCRREFRSAQALGGHMNVHRRDRARLHQAPVPSSSSNPMTSSLPTSPFINIPPQDLVANAGLCLLYHLPKSPSSTAPPFPPSPTTPSPSTLLSISSYPTTNFLMQTSFNFPGAPATGINTTTTTTVSSLCYNSSKVEQSATSSSIDHNGHLEELDLELRLGHKPTPTS

SEQ ID NO: 32932 - protein, 305 aa, Glycine max
  Clone ID: TF_GmC166371_1.pep
MEEDQCWIKSRRKYSMSSNLDSSTNYPSSYDDHSSWEEQAFAKDAARSGCTWPPRSYSCSFCRREFRSAQALGGHMNVHRRDRARLKQPYSPQNEILSVDLEKITTQPLNSVQISFTSLGYLYPSSLGVLTHNNTNPNSDPYSHAPPSPSKVLVSSINKRGREKPQIPLYKGCHESSPDLPSKSMSNLTEDFRFCSRRLDPEAGVEKKLKGLDSRCGSTEGDDDKTDVAVSLNLFMNLARPTVQFETKEKDTSFKKRKEDASSIPFFPKSCSVDRLHMQSKMFELSPSSIEELDLELRLGYRSMV

SEQ ID NO: 32933 - protein, 226 aa, Glycine max
  Clone ID: TF_GmC736359_1.pep
MEQGQCWTKRKKYSLSSSTGSPTNPSYGDSWEEQAFAEDAANSLGGCIWPPRSYSCSFCRREFRSAQALGGHMNVHRRDRARLKQQPTSPHNEILCHDLETQRHKPVQSPFASLGGYLYPSPLCGLACKKTNPNCDPDFVASPSSSPSPSKALLAPSANIGTFREETMIPLYDSSILHKISPASNSSESWPNSAEDHRLYSCKFHPQADTTKPSKGIMDFRCRGNK

SEQ ID NO: 32934 - protein, 356 aa, Glycine max
  Clone ID: TF_GmC1203_1.pep
MGKKKKRVSSKVWCYYCDREFDDEKILVQHQKAKHFKCHVCHKKLSTAGGMAIHVLQVHKESVTKVPNAKPGRESTDIEIYGMQGIPPDILAAHYGEEEDDVPSKAAKVDIPPTQLVGGMIPPPLGTGYPPRPTLPTMPPMYNPAVPVPPNAWMVPPRPQPWFSQPPAVSVPPAAPYTQQPLFPVQNVRPPLPATAPALQTQITPPGLPTSAPVPVSQPLFPVVGNNDTTTLNIQLMHIFFSVDANLRGYLSFTSIYHLIGVPVGVASNSHSYASGPNTGGPSIGPPPVIANKAPAPQPATNEVYLVWDDEAMSMEERRMSLPKYQVHDESSQMSSIDAAIDKRILESRLAGRMAF

SEQ ID NO: 32935 - protein, 321 aa, Glycine max
  Clone ID: TF_GmC1203_4.pep
MGKKKKRVSSKVWCYYCDREFDDEKILVQHQKAKHFKCHVCHKKLSTAGGMAIHVLQVHKESVTKVPNAKPGRESTDIEIYGMQGIPPDILAAHYGEEEDDVPSKAAKVDIPPTQLVGGMIPPPLGTGYPSRPALPTMPPVYNPAVPVPPNAWVVPPRPQPWFSQPPVVSVPPAAPYTQQPLFPVQNVRPPLPATAPALQTQITPPGLPTSAPVPVSQPLFPVVGNNHTTTQSSAFSAPPLPSSVPSVTPVMSTNVPVDTHLSSNSSVTSSYQAIGVPGGAASNSHSYASGPILGGSFIGPPPVIANKAPASQPATNEVYF

SEQ ID NO: 32936 - protein, 130 aa, Glycine max
  Clone ID: TF_GmC285225_1.pep
MSYCNFPFALQTKMEFNSQNPKKSEIRWSPDNQGGPGQGKSYSCYFCKRGFSNAQALGGHMNIHRKDRAAKLKQSSEENLLSLDISIKATSDHPNDPSDFEEKILFRLGAGEEKHPRNHKYPFNFFSSQR

SEQ ID NO: 32937 - protein, 156 aa, Glycine max
  unsure (1)..(156): unsure at all Xaa locations
  Clone ID: TF_uC-gmflminsoy034g08b1.pep
YASALTHSLLGLFFSPLASSSIIAIISKLTKTWGFSSSSSPYFSSLQPLSRCDADLGCCWFSLVIDFSCVGGDQESVVNFAFFADPCVCVILKNQSNGRRSRSETHVQVLQQELSLWKILGWPHEVTCHXQCFNRGREAFIFQQQWLRMRFCIRRD

SEQ ID NO: 32938 - protein, 53 aa, Glycine max
  Clone ID: TF_701129039H1.pep
EVCGVRFTRNDKLKIHMRKHTGERPYSCPHCPARFLHSYDHKNHMHLHTGVRP

SEQ ID NO: 32939 - protein, 243 aa, Glycine max
  unsure (1)..(243): unsure at all Xaa locations
  Clone ID: TF_LIB4390-021-R1-K1-C11.pep
MTHPYCSNDFNAWFDLNSPCLFSTSSSPCSNNPPFYFPTSNTNYLHNCTNNDISFTQRIQSSPSSFPLPKEELPLLNLSPARGEDLESSFSAMKVNKEKEKELSMSANNNSLDDETAVTVALHLGLPSTTTTTTSSADLTSNVYSDKEDKKDTVASEYSPTRINKGQYWIPTPAQILIGPTQFSCPLCFKTFNRYNNMQMHMWGHGSQYRKGPESLRGTQPTAMLKLPCYCCAPXCKNTIDHP

SEQ ID NO: 32940 - protein, 241 aa, Glycine max
  Clone ID: TF_GmC1688_1.pep
MEKDIIHLSPTWDGDNGNSTEKRLRLFGFELNPSKDGYAKESGEGDESVNSSNSVSSGGDKTVQEKPSAKDSDERKFECQYCYKEFANSQALGGHQNAHKKERMKKKRLQLQSINRYLQHPFQSKHGFAHPSDTPWFYDPSTYNNSEFTLSEEPQISFNSNVLDANFSCDQKSSWYSLASHPSNSQQDTCMFTFSNASNNSPFIFKPCHFPASNQSHKSKALDLQLGLNLQSNTRSSLRRM

SEQ ID NO: 32941 - protein, 309 aa, Glycine max
  unsure (1)..(309): unsure at all Xaa locations
  Clone ID: TF_GmC1730_1.pep
MEFWGAEVKVGESVKVDPAEFEACIHLSQAALGEAKKDKPNEPVVLYMKVGQQKFVLGTLSREKIPQISLELVLEKEFELSHNSKNASVHFCGYKAFYDAGDDSEEDEFTDSEEDVPLLKAENGKPETKAEELKVPESKKAVAKASASAKQVKIVEPKKDNEEDSDDDSDEXDDFGSSDEEMEDADSDSDDESDDKEDDDEETHPKNKKADLGKKRPNESASKTPVSSKKAKNATPEKTDGKKGGHTATPHPAKKGGKTPNSEAKAKTPNSEAKAKTPKSGGLSCKTCSKSFTNESGLQQHNKAKHGGQ

SEQ ID NO: 32942 - protein, 138 aa, Glycine max
  Clone ID: TF_GmC1730_3.pep
GSSYQHPPSLHQKIQNHHHQNHHQSGDEDDDEETPPKKVDLGKKRPNESASKTPVSSKKAKNATPEKTDGKKGGHTATPHPAKKGGKTPNSEAKAKTPNSEAKAKTPKSGGLSCKTCSKSFTNESGLQQHNKAKHGGQ

SEQ ID NO: 32943 - protein, 182 aa, Glycine max
  Clone ID: TF_GmC908_2.pep
MVAILKRQRETEAEESIIRLAESLMQLSRVQQKSKPLLKTFSPTEFECKTCNRKFPSFQALGGHRASHKKPKFEGEELKEEAKKGLSLGNKPKMHECSICGMEFSLGQALGGHMRKHRGATSENNNEAFSSSIKQAISKVPVLKRSNSKRVMCLEMDLNLTPLENDLKLLFGNKAPRVDLSL

SEQ ID NO: 32944 - protein, 451 aa, Glycine max
  Clone ID: TF_GmC168_2.pep
MLDNNNCSASNSGAPSSSDAAFALSENGVANNKRKRRPAGTPDPDAEVVSLSPTTLLESDRYVCEICNQGFQRDQNLQMHRRRHKVPWKLLKRETAQGGHQKKRVFVCPEPTCLHHDPCHALGDLVGIKKHFRRKHSNHKQWVCDKCSKGYAVQSDYKAHIKTCGTRGHSCDCGRVFSRVESFIEHQDACTVRQHRPELQALQPACSSRTASSASPSSEANFSIAPPLQGLPVLPKPAEQQQQPATTTVLLTSEIHGNKSTTSHNLELQLLPSSTNSQAKRNTKENYGLKLSIGSCSNDKGNSSEPPERACSEAHRSPPERNNNNNNNNVSDYSTLEVARLQEFAGEELKLAIAEKAYAEEARREAKRQIEIAELEFENAKRIRKQAQAELSRAEELRKQAIKKIGSTVMEIACHTCKQQFQSSTVGVPSSEETSIVMSYMSSATTEGEAE

SEQ ID NO: 32945 - protein, 292 aa, Glycine max
  Clone ID: TF_GmC910_1.pep
PPVKLHQGCLGHALSKIERPFVCAVDDCQASYRRKDHLTRHLLQHEGKIFKCPVENCNSEFSLQSNMKRHTEEIHDDSSTTTSSDKSHKQHMCPEIGCGKVFRYASQLQKHEDSHVNLESVDMVCLEPGCLKHFTNVQCLQAHVKSSHQYMTCDICGTKQLKKNIKRHLRSHEAEGSSSETFQCEFKGCSCTFSRKSNLDKHKKAVHFNVKPFACGFTDCGMRFAYKHVRDNHEKTAKHVFTLGDFEEADEEFRSRPRGGRKRTCPTVEMLIRKRVTPPSQLEHWLFMQDSE

SEQ ID NO: 32946 - protein, 681 aa, Glycine max
  Clone ID: TF_uC-gmronoir015a12_FLI.pep
MLAAAGINGGSGTTQQQQQQLFGQLLGSNPFSQGTTPSLMFNNSSAFGGINPTEFDGAAMLAKLSAEFAAVAQAQHGQSGAISATTVQSTGGPSTQQNGAMGRGHTPAPSNKPPPQKRQYSSTSKNFCDLCNKEVCNKYFLRTHMLKMHNIIIDENKQLIANIDTVDKERKGEVKFRCDICHTSMNTREELKLHKRESHGMHAGGGGSQSAPLGGARGVPKATSSSASQPTAVSMDTAETNQQQQQKRVALPSFAPAASNFNAIEHQTQQQQQQSTQRRTTSEGTEANDENNQPLGVHSPQQQQTREAAGAQQPSLAGANPMKQLLSIIGGDEALPPSLVGGARLLRTTGERNDFKKDTEEEHLGHRIADANNNATNCRFCGLCLEEEGQLQLHQLMEHPNEYMAELQPTMDLPHSASTEDKLINQVALQMAEANSHNHHHHHHQHTSAPTAISATTEDFGRVLRRFVLFGRLFRRSRHGPSASATENEERHSVARRKCRRRRRKRRRRGKAPMPTVQKNLQKCAKIGGAPAHGAPQFCRQNVTGEAIDHFAEKDCQTDEFVFMSQMQATVRKSRRMRRTRPFAHPLGEIEARGSGRRTTAGRGGGRRGESTASEEAEDGGGGRRGRSGGTTPSGRRSQRSGGKDEHRRRSGGRSKTAACTETNKGRHGGRRKAQPYERFD

SEQ ID NO: 32947 - protein, 233 aa, Glycine max
  Clone ID: TF_GmC21_2.pep
MALETLNSPTTTAPSFPFDDPTIPWAKRKRSKRCSRDHPSEEEYLALCLIMLARGGTTRRVSTPPPQPTPDPSTKLSYKCSVCNKSFPSYQALGGHKASHRKLAASGGEDQPTTTSSAASSANTASGGRTHECSICHKSFPTGQALGGHKRCHYEGNSNGNNNNSNSSVTAASEGVGSTHTVSHGHHRDFDLNIPAFPDFSTKVGEDEVESPHPVMKKPRPFVIPKIEIPQYQ

SEQ ID NO: 32948 - protein, 312 aa, Glycine max
  unsure (1)..(312): unsure at all Xaa locations
  Clone ID: TF_GmC2530_9.pep
MAAPFSAASLFAIREEDQNQMKQQQHSSTPSSSTTPAAPPQKKRRNQPGTPYPDAEVIALSPKTLMATNRFLCEVCNKGFQREQNLQLHRRGHNLPWKLKQXTNKEPKRKVYLCPEPTCVHHDPFRALGDLTGIKKHYYRKHGEKKGKCEKCSKKYAVQSDWKAHSKTCGTREYRCDCGTLFSRRDSFITHRAFCDALAQESARFPGGLNPLGTHLFGTNHTTSLSLSQVGNQLSQVQKQNQTATNYNSILRLGNNNVGAAATKFEHLIPPLNHSSFGHSPQSMPSSAFFMNDNTNQALFEEHQSQLQGLMQ

SEQ ID NO: 32949 - protein, 185 aa, Glycine max
  Clone ID: TF_GmC149295_1.pep
FITFHIVINSSYVSMKRQRDFKGFESIDLANCLMMLSHPQQNEKLLQKKIEAVEFECKTCNRKFSSFQALGGHRASHKRSKLEGDHELKAHAISLSLANKPKMHECSICGQEFSLGQALGGHMRRHRTTIHEDFSSIKQVITQMPVLKRSNSTRVVTCLDLNLTPLENDLKLLFGKMAPNAGAFA

SEQ ID NO: 32950 - protein, 207 aa, Glycine max
  Clone ID: TF_GmC475_1.pep
EKTKLARALLQSQQLSCSALFCYSNPLIKPTYVVAMKRGREESKLDMANCLMLLTKVGESETNYPISKGSDIGDFKCKTCNRRFSSFQALGGHRASHKKPKLMVTDLSCHQELPNPTMKQQPRMHPCPICGLEFAIGQALGGHMRKHRTAINDGLLCGKPSSSLSILKESSKDGDQKLNLRLDLNLTPLEEDDLKLNLRTPVLNCFI

SEQ ID NO: 32951 - protein, 783 aa, Glycine max
  unsure (1)..(783): unsure at all Xaa locations
  Clone ID: TF_GmC4501_1.pep
PRVRQEEAEAKMVAEDLGIDYMWKNIEYSHASKEDEEKIQSALDSEEAIPGNGDWAVKLGINLFYSANLSRSPLYSKQMPYNSVIYSAFGCSSPASSPVEPKVYQRRVNRQKKIVAGKWCGKVWMSNQVHPLLAKRDFEDVEDEKLLIGWILPDEKLERSEITLKSEATSRKSGKKRKMTAENGRFKKGSXLTKNVLSDNSTEDKHNLPPRSILRNKKVRYVERDRAALKGGYCPPYHRKPSNNQTNFSESDAVSDDSLDDDDHMQQRRNVIIEKAKFMDNDVVSNDRXDYDSDWQQREELSSKQVEDTERDAISEDSLDVGSLQLLRKNSRAKHAKNISQEDIISDDQMESPLQKRQRRIPKSRQGKYLTGKDIISDDQLEHKKKKQQRKNPKSRQAKYLNEEDIASDDQLEGHYRRYQRKNSRGRHAKCVAGEDGMPDDQLEDHCQKQQTNFSRKRQNKGIVREVKNEMCDDQLEDHFLKQHRRFPKSRQNKHTEKEVMDDLAENNSHLLHRTPKRKQAKCMEEDDMNSDDEMEDDQPLRRALRSKQAKPKTLLKQANSFQAKKQASRPIKQGSRLLVKSKAPQQIKQPAHLRNKQSNNTQEFSLYMEEEEDGGPSTRLRKRATKAQESEGKLKDKQTKRMKVKNAAAAKVSVGHAKMKDGEAEYQCDIDGCTMSFGSKQELMHHKRNICPVKGCGKKFFSHKYLVQHRRVHEDERPLKCPWKGCKMTFKWAWARTEHIRVHTGARPYVCAEPDCGQTFRFVSDFSRHKRKTGHSAKKNCQ

SEQ ID NO: 32952 - protein, 289 aa, Glycine max
  Clone ID: TF_GmC724_3.pep
GCGKTFIDAGALRKHSHIHRKWQYVCHYDGCGKKFLDSSKLKRHFLIHTGERDFVCPHEGCGKAFSLDFNLRSHMKTHSQENYHICPYPDCGKRYAHEYKLKNHIASHHEKNAPLDVAKYTTPPPEKQTKTSKPSGGAYGSASSDRPYACPYDGCEKAYIHEYKLRLHLKREHPGLMADENAEHAQANVGNEMDEASDHDAYVAKRSNGKIQKQSKPKPNLKLPPSKIAKRKVSTPTLTVNKNSWPVKDEPFDEEDSEETEEDRDNVEDGWRYAGGNNEDDDEETEYED

SEQ ID NO: 32953 - protein, 323 aa, Glycine max
  Clone ID: TF_GmC431_1.pep
MGLMECNVEDNKNLYLHAPTFIEWLKPCSSPNYSYLNSNTISYSSSSSPSSSSFSLTQNEFVQETIQFLPILSEKASKDEDQSFEVKEEKVEQVTVALHIGLPDSNKGHADEVDEKMIFHVKEEEESSKRSFHGCSFNNQERRFWIPTPAQILVGPMQFACSICSKTFNRYNNMQMHMWGHGSEFRKGPDSLKGTQPAAMLRLPCYCCAQGCKNNINHPRAKPLKDFRTLQTHYKRKHGTKPFMCRKCGKTFAVKGDWRTHEKNCGKLWYCTCGSDFKHKRSLKDHIRSFGKGHNPHPPFEAFEDEKECITGSDEDEVNAHHT

SEQ ID NO: 32954 - protein, 178 aa, Glycine max
  unsure (1)..(178): unsure at all Xaa locations
  Clone ID: TF_GmC222431_1.pep
KGQSWVPYPFSXILMVPTQFPCPVCCKPFNRSNNMQMHMWGHGSQYRKGPESLRGTQPTGMLRLPCYCCSPGCRNNIDHPRAKPLKDFRTLQTHYKRKHGIKPFMCRKCGKAFAVRGDWRTHEKNCGKLWYCICGSDFKHKRSLKDHIKAFGSGHAAYGIDGFEEEEEPASEVEQDND

SEQ ID NO: 32955 - protein, 179 aa, Glycine max
  Clone ID: TF_GmC908_1.pep
MVAILKRQGENESEETIIGLAKSLMQLSRVQQQSNKPLLKTFSPTEFECKTCNRKFSSFQALGGHRASHKKPKFEAEELKEEAKKTKPKMHECSICGMEFSLGQALGGHMRKHRGAISENDNNNEALSSIKQAIAKAPVLKRSNSKRVMCLEMDLNLTPLENDLKLLFGNKAPRVDLSL

SEQ ID NO: 32956 - protein, 383 aa, Glycine max
  Clone ID: TF_GmC47148_1.pep
MFPAVMSNSNSWSEEATVSCGTRITGLNHVVTTTISPQQPQKIKKKRNLPGNPDPDAEVIALSPKTLLATNRFVCEICNKGFQRDQNLQLHRRGHNLPWKLKQRSNKDVKKKAYVCPEPSCVHHNPSRALGDLTGIKKHYCRKHGEKKWKCEKCSKIYAVQSDWKAHSKTCGTREYRCDCGTLFSRKDSFITHRAFCDALAEESARLSANNLAAAAGATVTTTTTNPFQSLYLFQTQQQNFQNHQMTSFNQWDSSQENPNPSNNIATTSLHIEPESQSFHNPTLSSFLQQQQQGQQPNNNNRGMIASPFGNLHVAAAAPATSSYMSATALLSEGCNRWSRCHNRPSTCWATTAREGSRGSPPRRRRVRNRYSESTRPGGVGAR

SEQ ID NO: 32957 - protein, 233 aa, Glycine max
  Clone ID: TF_GmC444_5.pep
MALEALQSPRTATPSFSPFEETNLSYLETPWTKGKRSKRSRMEQQLQHSSCTEEEYLALCLIMLAHGGAGGVPAAKPAVSDNNSAPLPAAKLSYKCSVCNKAFSSYQALGGHKASHRKLGGEHHSTSSAVTTSSASNGGARTHECSICQKTFPTGQALGGHKRCHYEGGNSAVTASEGVGSTHTGSHRDFDLNLPAFPDFSTRFFVDDEVTSPHPSKKSRLNLTIPKIEIPQY

SEQ ID NO: 32958 - protein, 144 aa, Glycine max
  Clone ID: TF_GmC719_1.pep
MASCLMLLTKVSDTETPSRKRVLSGGDFKCKTCNRKFQSFQALGGHRASHKKLKLMASNLSCSTVTQKMHQCPICGIEFAIGQALGGHMRKHRASLNDGLITHDHVVPTSSGTKRLRLCLDLNLAPYENDLNLNLRTPTLNLFV

SEQ ID NO: 32959 - protein, 521 aa, Glycine max
  Clone ID: TF_GmC2175_1.pep
MDSNGSLRANTWARSSSLTSPASGLSSDPLSFPGFGLQHNQQKWDVPSNSDFGIRAEAPFKEFNQPSQTQSPLPCNSNNEIEIPGQENCHLSESSQTNTLQDWDPSVMLNNLSFLEEKIHQLQDLVHLIARQKGIGQPNELVTQEQQLVTTDLTSIIIQLISTAGSLLPSARHNLVNTSSLVGQIDQLRGTTIPPGTGASNGCIQPQNNGGKILSDQSMQTDLPNSGEMEQKYNMVEHDLKDEEDVEDGENLAPGSYEILQLEKEEILAPHTHFCTICGKGFKRDANLRMHMRGHGDEYKTPAALAKPHKESASPKPIKRYSCPYPGCKRNKDHKKFQPLKTILCVKNHYKRTHCDKSYTCSRCNTKKFSVMADLKTHEKHCGKDKWLCSCGTTFSRKDKLFGHIALFQGHAPAIPLDDTKGAGVAEAPIHDSKENNSKVQSMNFTFGSNPSNANEVPNAMDAKGDSDDPINYFSSLNFEANFGEFNEFTRPLFDDPEGSFSFVMPGSFKSGGESSSDNLL

SEQ ID NO: 32960 - protein, 509 aa, Glycine max
  Clone ID: TF_GmC558_1.pep
MDPKGSLCATRSSSLTSPGNGLQTNLSSDPPSFYGVRIESPFEEFIQPSPPTQSVLPGESNTDIDIPDQENCPLSDSSHTSKLQDWNPSAMLNNLSFLEVKIHQLRDLVHVIVSKKCQPFGQPHELVTQEQQLITADLTSIIVQLISTAGSLLPSVRHTLTNANPLVGQLDQLHGINLPFESEPSSGIRPQNNSGNKLFDQSIQNDLPNKLEMEQNYNMEEHEPKDEEDVDEGENLPPGSYEILQLEKEEILAPHTHFCTICGKGFKRDANLRMHMRGHGDKYKTPAALAKPHKESGSEPKLISRGIPAPMPAERNKDHKKFQPLKTILCVKNHYKRTHCDKSYTCSRCNTKKFSVMADLKTHEKHCGKDKWLCSCGTTFSRKDKLFGHIALFQGHTPAIPLDETKGMAEPPDIQNRESNNKVESINFCFGSNSSSENVVQNMMDMKGNNDDPMNYFSSLNFEGCNFGAFNEFSQPPFEDSDGCFSFPMSGSFNYAPKFGGGESSSDNL

SEQ ID NO: 32961 - protein, 409 aa, Glycine max
  Clone ID: TF_GmC135_3.pep
LDPEAEVVALSPKTLLATNRFICEICNKGFQRDQNLQLHRRGHNLPWKLKQRSSKDIIRKKVYVCPEPSCVHHEPSRALGDLTGIKKHFCRKHGEKKWKCDKCSKKYAVQSDWKAHSKTCGTREYRCDCGTLFSRRDSFITHRAFCDALAEESARSVTGIVANSTTQPTEAAGVVISSSSLHQDMIHASNNNFPLKKEQQGCIPHWLGQPSPSSASSSFLFSHQDHHLHENPNPRGGPTLLPPPYHQTAPHMSATALLQKAAQMGATMSKTGSMIRTHQQQAHVSANAALNLSSRDHQMNPTPHDLLPFGNNKAVDNGVGVSPSLLHHVINSFSSSPFEGTFEDTFGGGDAMTADEGGGGGAGGNNNEGLTRDFLGLRHLSHTDILNIAGVGNCMNSSQHNQTRNPWQG

SEQ ID NO: 32962 - protein, 224 aa, Glycine max
  unsure (1)..(224): unsure at all Xaa locations
  Clone ID: TF_GmC2530_8.pep
MTAASSSTPFLGIREESPQITTHHQPSTVSPTTAPQKKRRNQPGTPYPDAEVIKLSPKTLMATNRFICEVCNKGFQREQNLQLHRRGHNLPWKLKQKSTTKEPKRKVYLCPEPTCVHHDPSRALGDLTGIKKHYYRKHGEKKWKCEKCSKKYAVQSDWKAHSKTCGTREYRCDCGTLFSRRDSFITHRXAFCDALARVTSRERCIYISKGTRSNGVYVHQWWGD

SEQ ID NO: 32963 - protein, 315 aa, Glycine max
  Clone ID: TF_GmC57025_1.pep
MEGLDSNNSTHNSIAKGKRTKRMRLLSPCGVIVAAITTTTTVTSSTSSANSGASSTTTYESEEEDMANCLILLAQGGESRHHPRHDKQQVEDHGLENCDDGAIKTEEKGNSSNVNTTTAATTTAANNNTKVGFYIYECKTCNRTFPSFQALGGHRASHKKPKLAAEEKKQPLPPSPLPPPTPSQLQHMIVTNYDRFEEGSVKSGPPISLQLGNNGNNNKGKIHECSICGSEFTSGQALGGHMRRHRASTNANNVVDTTSCNTVITTTITAVPPRNILQLDLNLPAPEDDLREAKFQFTATSQVLVGTPALVDCHY

SEQ ID NO: 32964 - protein, 338 aa, Glycine max
  Clone ID: TF_GmC48528_1.pep
MSNSISDPTRIIHSQDPNTTADPQVPLRNLSQVRNRMDSLQHFLSQSINTNTPLTVDQIAMVSSQILSSIHQVIVNGAALVSYSQNSIAAGAPDPPPYPKKPKPEPSVADKAKQTLDSKLEPLEGDDSEIVELDAVEILAEHMHFCEICGKGFRRDANLRMHMRAHGEQFKTAEALAKPSEKASWLRATRFSCPFVGCNRNKLHRRFRPLKSVICVKNHFKRSHCPKMYTCERCRKKHFSVLSDLRSHLKHCGGEARWKCTCGTTFSRKDKLFGHIALFEGHAPALACDEEGKGKQMVEDDEDPMLMSESGFELDDCFLDQEFPEGFFDDFGSIDDYC

SEQ ID NO: 32965 - protein, 181 aa, Glycine max
  unsure (1)..(181): unsure at all Xaa locations
  Clone ID: TF_LIB4165-008-Q1-K1-F10.pep
RVRSNIDNFIRSPCEGLRPRAGKIATDKSGVEINQVDKENQVAKRARRSSEGLVPHKNKKXDVKKPHKCDLDGCQMSFKTKAELLLHKRNLCPHEGCGKKFSSHKYALLHQRVHDDERPLKCPWKGCSMSFKWAWARTEHIRVHTGEKPYHCKVEGCGLSFRFVSDFSRHRRKTXHHVKPA

SEQ ID NO: 32966 - protein, 164 aa, Glycine max
  Clone ID: TF_GmC793411_1.pep
MKREREVDSITMANYLMLLSRTTTNLNTSNNRVFECKTCNRRFASFQALGGHRASHKKPRLMGESDSQVLIHGSPPKPKTHDCSICGLEFAIGQALGGHMRRHRAAAAAASNGNMHTTINSWLSSGSSSGGSTVDNTLPPNMNHNPNVTDTKRILFPDLNLTPL

SEQ ID NO: 32967 - protein, 489 aa, Glycine max
  unsure (1)..(489): unsure at all Xaa locations
  Clone ID: TF_GmC282_3.pep
MPVDLDNVSTASGEASVSSSGNLTVPPKPTTKKKRNLPGMPDPDAEVIALSPKTLMATNRFVCEICNKGFQRDQNLQLHRRGHNLPWKLRQRSSKEVRKRVYVCPEPTCVHHDPSRALGDLTGIKKHFCRKHGEKKWKCDKCSKKYAVQSDWKAHSKICGTREYKCDCGTLFSRRDSFITHRXFCDALAEESARSQPQTVAKASSESDSKAVTGDSSPPVAVEAPPPLVPPVSSQSNSVVVPSSSLQTQKPELPENSPQIIEEPKVNTAMNGSCSSTSTSTTSSTSNSNSGASSSVFASLFASSSASATASLHSQTPAFTDLIRAMGHPDHPADLSRPSSSEPISLCLATNHGSSIFGTGRQERRQYAPPPQPAMSATALLQKAAQMGAAATNASFLRGLGIVSSSASTSSVQQDNLQWGHQPVEPESASVPAGLGLGLPCDSSSGLKELMMGTSXSMFGPKQTXLRFLGLGEWAAGGTPWVEGLSALI

SEQ ID NO: 32968 - protein, 158 aa, Glycine max
  Clone ID: TF_GmC427_1.pep
MNNNMLGMKRRRDDNEGSLDLAKCLMLFSCPIESNKTQQKSFGSVEFECKTCNRKFSSFQALGGHRASHKRQKLEGEELKEQAKSLSLWNKPKMHECSICGLEFSLGQALGGHMRKHRASLNEGFPIIPSIDQVIAKIPVLKRSNSTRVMCLDLELHL

SEQ ID NO: 32969 - protein, 510 aa, Glycine max
  Clone ID: TF_GmC23433_2.pep
MSNSNITSCDSWSFTTENNNNGEDAAATVKQQLEMLGQLYSPNSNTSTTTNNSNGGSNADSQPPAKKKRNLPGNPDPSAEVIALSPNTLVATNRFICEICNKGFQRDQNLQLHRRGHNLPWKLKLRTTTEVRKRVYVCPEPSCVHHNPARALGDLTGIKKHFSRKHGDKKWKCEKCSKKYAVQSDWKAHSKICGTKEYKCDCGTIFSRRDSFITHRAFCDALSEENNKFNEGQLPKMHGSNLQPPTIIPNLVASLPINGANNHKHPLSLPHDLMTTIPAKPFNNNMAAAFTRSLSSTSQLSSKSPNINMFEENGLLSPHMSATALLQKAAEMGATVNSNSNNNSMMMSGEKSFINVTSMAPPSYGIMNPNMHNGQQDLSQYNFIANGVVDGGSNGMGMGGLDMFNAILDQSKALSKIIEQNNRNSTYNGVLHAMNNGKSSDPIEGGGTKGSEAVNHVMTLDLLGIGGGGGDGNFYGGDQQSEIAAGDGIWGNWSNKNAGLESFSATNSTI

SEQ ID NO: 32970 - protein, 268 aa, Glycine max
  Clone ID: TF_GmC282_4.pep
MTVDLDNASTASGEAASVSSSGNQTKPAAPKKKRNLPGMPDPEAEVIALSPKTLLATNRFVCEICNKGFQRDQNLQLHRRGHNLPWKLRQRSSKEVRKRVYVCPEPTCVHHDPSRALGDLTGIKKHFCRKHGEKKWKCDKCSKKYAVQSDWKAHSKVCGTREYKCDCGTVFSRRDSFITHRAFCDALAEENARSHTVVKDISENDSKVLIGDSPPPQPVAATVAATTAAATTTTTTPRVRGRVANSVMSFGLHTHNLYLPDNNSPQVI

SEQ ID NO: 32971 - protein, 157 aa, Glycine max
  Clone ID: TF_jC-gmle01810062b01a1.pep
MAGIATETIDSFITAASPKSYDGSDLTPSQYSDAFANQPTDLTEDAFTPFESVDDLQDDRSIIKDIDLASLGHATHDVNESANSLSKKLFACEICGRSFQRIDHLARHKVNHDSVKPFNCIVCHRAFARKDVYRKHLQRHEADRRTRKPHTAPLHAH

SEQ ID NO: 32972 - protein, 483 aa, Glycine max
  Clone ID: TF_GmC168_1.pep
MLANNLSPSSVPTSEPFPCTENGTATNKRKRRPAGTPDPDAEVVSLSPKTLLESDRYVCEICNQGFQRDQNLQMHRRRHKVPWKLLKRETPVVRKRVFVCPEPTCLHHDPCHALGDLVGIKKHFRRKHSNHKQWVCERCSKGYAVQSDYKAHLKTCGTRGHSCDCGRVFSRVESFIEHQDACNMGRLRPHESRQEDKTTSTSGTRQSLLLERTCNEANQLHHAPNHLPWLQTTVPSFMNNPITAITTAETSSKSNNKLLHPNLDLQLSTPTNNNNSNTSNTNTSNIANPIDNAAISAKRDHYHENHSTHLQLSIGSSDMSEKNDQSNRNSSEKSSNNSNNINDQNNKQQSNNMALLRVQEQAREHLRIAMAEKAYAEEARKQAKRQIELAEKEFTNAKRIRQQAQAELDKAYALKEHAMKQINSTMLQITCHFCKQQFQARNATTTSPDDNSLVLSYVSSAITTEGGEVENDNIAKDHAKDNN

SEQ ID NO: 32973 - protein, 346 aa, Glycine max
  Clone ID: TF_GmC168_3.pep
MYADPDAEVVSLSPKTLLESDRYVCEICNQGFQRDQNLQMHRRRHKVPWKLLKRETTAVVKKRVFVCPEPSCLHHDPCHALGDLVGIKKHFRRKHNNHKQWVCERCSKGYAVQSDYKAHLKTCGTRGHSCDCGRVFSRVESFIEHQDACNVGRLGPETQSQAQAVQAAACLSRTASSETNFSTGSPWPQSGTIIIPNPTVTVVEPSSYTIVTAETNNKVHPNLELQLSNTTPTASSQEERVHQEQLRIAKAKKALAEEARKQAKRQIELAELEFTNAKRIRQEALAELDKAYAFKDHAIKHINSIMLQITCRACKHHFHSPTDDQIFSYITQARQVQKHRLKPIIN

SEQ ID NO: 32974 - protein, 351 aa, Glycine max
  unsure (1)..(351): unsure at all Xaa locations
  Clone ID: TF_GmC724_2.pep
MEIHYSNSYFERRPILKSKAAAVKWXKNEDTLKTLKEKVKEPSVPEPEPEPTTEVLFLCSYDGCGKTFIDAGALRKHSHIHGERQYVCHYDGCGKKFLDSSKLKRHFLIHTGERDFVCPHEGCGKAFSLDFNLRSHMKTHSQENYHICPYPDCGKRYAHEYKLKNHIASHHEKNASVDVTKYTTPPSEKQTKTSKPSGGAYGSASSDRPYACPYDGCEKAYIHEYKLRLHLKREHPGLMADENAEHAQANVDNEMDEASDHDAYVAKRSNGKIQKQSKPKPNLKLPPSKIAKRKLSTPSLTVNKNSWPVKDEPFDEEDSEETEEDRDNVEDGWRYAGGNNEDDDEETEYED

SEQ ID NO: 32975 - protein, 263 aa, Glycine max
  Clone ID: TF_GmC1644_2.pep
MDRHKCKLCSRSFSNGRALGGHMKAHLASLPLPLPPKLHSCFSSSDSEQEQSLRENPKKTLRILDPEDRESETESNKNPTRQRSKRNWKSTMPKLSLGHPEAEPLSSVSDTSPEEDLAMCLMMLSRDTWQEHKLANAGPPKTRCSSGSEIKLKSKVRSKHLCHACHKSFRSSRALGSHRTLCSPRLEAQNNSIISNNNIKVFECPFCYKLFGSGQALGGHKRSHLIPSSSSTVNHSVKLKQSFIDLNLPAPAEDDDLSVVSDA

SEQ ID NO: 32976 - protein, 368 aa, Glycine max
  Clone ID: TF_GmC1922_2.pep
MMSQEAISVPSNNLRDPSVQLHEPNSNSNSNPNNPNPNSLKRKRSLPGTPDPNAEVIALSPKSLMATNRFICEVCNKGFQRDQNLQLHRRGHNLPWKLRQRNKEEVVKKKVYVCPEKSCVHHDPCRALGDLTGIKKHSRRKHGEKKWKCEKCSKKYAVQSDWKAHNKICGTRQYKCDCGTIFSRKDSFVTHRAFCDAMAEQNARLPSVLSNLGSEILMNAAQAPRVMPQALQLHGFHSEFGGPGQEPYIGNFADVNHDEHKLRMPLWLDQTNNPLQLNHHHHHHPLSVSSNNSSSLFSPGTTLAEVNNMFGTSSSSQGQWLNYRYHPEASFTHANVSIPHGLKLEQEENKGNLSHSSPKSESADNNIV

SEQ ID NO: 32977 - protein, 371 aa, Glycine max
  Clone ID: TF_GmC724_1.pep
MEIHYSNSYFERRPILKSKAAAVKWVKEWVPQDLVTTGGKCMILKWVTEDTLKTLKEKVKEPSVPEPEPEPTTEVLFLCSYDGCGKTFIDAGALRKHSHIHGERQYVCHYDGCGKKFLDSSKLKRHFLIHTGERDFVCPHEGCGKAFSLDFNLRSHMKTHSQENYHICPYPDCGKRYAHEYKLKNHIASHHEKNASLDVTKYTTPPSEKQTKTSKPSGGAYGSASSDRRNVLRLMLRVKAYIHEYKLRLHLKREHPGLMADENAEHAQANVDNEMDEASDHDAYVAKRSNGKIQKQSKPKPNLKLPPSKIAKRKLSTPSLTVNKNSWPVKDEPFDEEDSEETEEDRDNVEDGWRYAGGNNEDDDEETEYED

SEQ ID NO: 32978 - protein, 260 aa, Glycine max
  Clone ID: TF_GmC50_4.pep
MALEALNSPTAATTPFRGYQEEEEDEEADLHLREPWAKRKRSKRPRFETEEEYLALCLIMLAQSGNTRNIHNNNTQLPSSSLSDKEASPPVKLTHRCTVCNKAFGSYQALGGHKASHRKASSESNPTASVSALANDSVSASTVGGGRMHECSICHKSFPTGQALGGHKRCHYDVRLREDTEGANGNNSSGATTSDGGAASSSHTLRGFDLNLPAPLTEFWSPMGFDFGKKKVGGEQEVESPLPVTAKRPRLFTGEDDETA

SEQ ID NO: 32979 - protein, 162 aa, Glycine max
  Clone ID: TF_jC-gmXLIB3563P002dh04a1.pep
RNIHNNNTQLPSSSLSDKEASPPVKLTHRCTVCNKAFGSYQALGGHKASHRKASSESNPTASVSALANDSVSASTVGGGRMHECSICHKSFPTGQALGGHKRCHYDGGNNHSNSNANGNNSSGATTSDGGAASSSHTLRGFDLNLPAPLTEFWSPMGFDFRK

SEQ ID NO: 32980 - protein, 242 aa, Glycine max
  Clone ID: TF_GmC7996_1.pep
HSFCLDMNQNQLQPLPLLSSFLGSSPEESLLQNQNENPNACHAQVEDVTVALHIGLPDHSSGSNSTNNHGFVNATTQVPNNYWIPTQEQILIGFSHFSCPVCHKTFNRYNNLQMHMWGHGSQYRRGPDSLKRTHPRPLLDLPCYCCARGCKNNIEHARAKPLKDFRTLQTHYKRKHGSKPFTCRKCGKPLAVKGDWRTHEKNCGKRWLCICGSDFKHKRSLKDHIKAFGFGHTPFSSFSDGM

SEQ ID NO: 32981 - protein, 298 aa, Glycine max
  Clone ID: TF_GmC1658_1.pep
MERYKCKLCSRTFSNGRALGGHMKAHLATLPLPPQNQQPPLSPSAAASFSSNSSSEQEQATHDEKSLIYGLRENPKKCFRLADPEFDTGSVVQDRESETESKNPTRRRSKRTRRPVNLEQKKPKLSFMESPEPVSSVSDTSPEEDVAMCLMMLSRDRWSKNNNINVVNVNDEDVVEEEEEEEEEEEEGGRSVLEIKLRRVRGKHQCQSCGKTFRSSRALGSHRSICEGSGNDSKIFQCPFCSKVFGSGQALGGHKRSHLMPSSSTTANNDSVRLKESFIDLNLPAPPEDDDLSVVSDA

SEQ ID NO: 32982 - protein, 253 aa, Glycine max
  Clone ID: TF_GmC153491_1.pep
MVSNSAFEDNGTDNNHNSNNKYTSIKAKFMDSELKSSPLKSWVNNNKNSEGEFSKSSNKRGKFECTTCKKIFHSYQALGGHRASHKRIKGCFASRNESSENSTELEAELSPDPTTESKLLKNEYVEEHEMVTNVTTATTTTQFDNEVETVRDSKKGKGHECPICHKVFPSGQALGGHKRSHHLAGGSESARNFQSQTIVLEEAAPEIRDFFDLNLPASTEEEGTGHGHAEHYRPWWVVGGNHKQEALVGLISN

SEQ ID NO: 32983 - protein, 348 aa, Glycine max
  Clone ID: TF_GmC296_1.pep
EAPEELSFGGSKDHTNIAKGKRTKRVRPQSPIPFSITANSSTGGEKEEDCYNVDDDNIIKNEDINNNNINNINSTPTTSAELQDITDEEEDMANCLILLAQGQSRESPKHAEEDAGMSYAKHNSRKFLEAATLGSSRAGYYVYECKTCNRTFPSFQALGGHRASHKKPKALMAIGQKKKQQHLLSSDEEEFQLKTNKSPFSIQLNTNGNLYSSSSNNNNKSKVHECSICGAEFTSGQALGGHMRRHRAPVGTTPTATILSFTPLALEPEEDHPRKKRNVLNLDLDLNLPAPEDDHRESKFAFASKQQQQQHGQKQPQQHHHPEQKQQQPQQQQTSLVFPVPALVDCHY

SEQ ID NO: 32984 - protein, 184 aa, Glycine max
  Clone ID: TF_uC-gmroLIB3258P126b02a1.pep
EYCGICRSKKTLITSHINLHHKEEYEKARAERDPEAEASKSNSCEECGATFKKHAYLLQHMQSHSLERPFVCAVDDCQASYRRKDHLTRHLLQHEGKIFKCPVENCNSEFSLQSNMKRHTEEIHDDSSTTTSSDKSHKQHMCPEIGCGKVFRYASQLQKHEDSHVNLESVDMVCLEPGCLKHFT

SEQ ID NO: 32985 - protein, 313 aa, Glycine max
  Clone ID: TF_GmC1072_1.pep
MLAQMDMEELVSCNNNDATNIAKGKRTKRRLRPLSPCAVVAATTITTTTTAITAITTVMTSSCSSASAGGGGSSSSTTFEEEEEDMANCLILLAQGRVGRDPPHHHKDLCGDVKTEKGSTKVDHLYVYECKTCSRTFPSFQALGGHRASHKKPKMEEKKLLSPPLLLPPLPASSSSLFNFEEAKQSHMKNIISPSVSLQLGCGINKVGLNFHGNKSKIHECSICGSEFTSGQALGGHMRRHRASNNNNNIVQTTTTTTTTSNGAVDVKPRNVLELDLNLPAPEDDLRDSKFQFPANPNSMMLSAAPALVGCHY

SEQ ID NO: 32986 - protein, 240 aa, Glycine max
  Clone ID: TF_GmC21_1.pep
MALEALNSPTTTAPSFPFDDPTIPWAKRKRSKRSRDHPSEEEYLALCLIMLARGGTTTVNNRHVSPPPPQPQPQPTPDPSTKLSYKCSVCDKSFPSYQALGGHKASHRKLAAAAEDQPPSTTTSSAAATSSASGGKAHECSICHKSFPTGQALGGHKRCHYEGNGNGNNNNSNSVVTVASEGVGSTHTVSHGHHRDFDLNIPAFPDFSTKVGEDEVESPHPVMKKPRLFVIPKIEIPQFQ

SEQ ID NO: 32987 - protein, 159 aa, Glycine max
  unsure (1)..(159): unsure at all Xaa locations
  Clone ID: TF_GmC427_2.pep
MLGMKRHRDNEGSESLDLAKCLVLFSCPIESNKAQQKGFGAVEFECKTCSRKFSSFQALGGHRASHKRQKLEGEELKEQAKTLSLWNKPKMHECSICGLEFSLGQALGGHMRKHRAALNEGFPIIPSIDQVIAKIPVLKRSNSTRVMCLDLXVTPVENE

SEQ ID NO: 32988 - protein, 144 aa, Glycine max
  Clone ID: TF_GmC39743_1.pep
MKRQRENEVTTLESWDMQICSTSITPDTSVSSSTISPEDVFECKTCNRKFNSFQALGGHRACHNKRVKMEGEEQQLKTRAKYLGLGKHSEPKMHNCSICGQGFSLGQALGGHMRRHRASTNDVFSSIKQVVAKVSVLKRSCNDK

SEQ ID NO: 32989 - protein, 265 aa, Glycine max
  Clone ID: TF_GmC1644_1.pep
MDRHKCKLCSRSFSNGRALGGHMKAHLATLPLPPKPHSYSSSSDSEQEQEQESLNYALRENPKKSFRVADPEDRESETESRNPTRQRSKRNRKSTMPKLTPPPHPEPEPLSSVSDTSPEEDVAMCLMMLSRDTWQQHKHANAATPKRRCSSGSEIKKNVRGNHLCHKCHKSFRSSRAFGSHRNVCCPREEGQNNYNNNRSTKVFECPFCYKVFGSGQALGGHKRSHLIPSSSSTVNDSVKLKHSFIDLNLPAPAEDDDLSVVSDA

SEQ ID NO: 32990 - protein, 467 aa, Glycine max
  Clone ID: TF_GmC282_1.pep
MTVDLDNASTASGEAASVSSSGNQTKPAAPKKKRNLPGMPDPEAEVIALSPKTLLATNRFVCEICNKGFQRDQNLQLHRRGHNLPWKLRQRSSKEVRKRVYVCPEPTCVHHDPSRALGDLTGIKKHFCRKHGEKKWKCDKCSKKYAVQSDWKAHSKVCGTREYKCDCGTVFSRRDSFITHRAFCDALAEENARSHTVVKDISENDSKVLIGDSPPPQPVAATVAATTAAATTTTTTTITSTTQANSVISSCSTSNGGATCNSNSSSSVFASLFASSTASVTLQSQTPAFSDLIRAMGPPEHPADQISGPSSEAISLCLSTTSASPIFATGGRQYASSSPHPAMSATALLQKAAQMGAAATNASLLRGLGIVSSSPLDSTSGSVAAAGLGLGLPCEDGGSGLKELMMGTSSMFGPKHTTLDFLGLGMAAGGTAGGGLSALITSIGGGLDVTAAFGNGDFSGKDIGSSS

SEQ ID NO: 32991 - protein, 511 aa, Glycine max
  unsure (1)..(511): unsure at all Xaa locations
  Clone ID: TF_GmC282_2.pep
MPVDLDNASTASGEAASVSSSGHQTKPAVPKKKRNLPGMPDPEAEVIALSPTALLATNRFVCEICNKGFQRDQNLQLHRRGHNLPWKLRQRSSKEVRKRVYVCPEPTCVHHDPARALGDLTGIKKHFCRKHGEKKWKCDKCSKKYAVQSDWKAHSKVCGTREYKCDCGTVFSRRDSFITHRAFCDVLAEENVRSHAVVKDNSENDSKVLTLTGDSPPLQPVSATVATTTTQTNSAMSCGLQTQNLELPETNPPQVIEEEPQGATAVSGSCGSNSTCSTSNGGATSNSNSSSSVFAGLFASSTASGSLHXQTPAFSDLIRAMGPPEHPADLISAPSSSEAISLCLSTTSASPIFATVGQQYVSSPPQPAMSATALLQKAAQMGAAVTNASLLRGFGIVSSSSLASTSSGQQNGLQWGQQQLESESGSVPAAGLGLGLPCEDGGSGLKELMMGTPSMFGPKHTTLDFLGLGMAAGGTAGGGLSALITSIGGGLDVTAAFGNGDFSGKDIGGSS

SEQ ID NO: 32992 - protein, 537 aa, Glycine max
  unsure (1)..(537): unsure at all Xaa locations
  Clone ID: TF_GmC1035_1.pep
MYEKGQSDEKGHFSSIFMGSDKILPSHVVANGHAPLDSGHARLKELGYKQELKRDLSVISNFAFSFSIISVLTGVTTLYNTGLNYGGPVSLVYGWFLASAFTMLVAFSMAEICSSYPTSGGLYYWSAKLAGPRWAPFASWITGWFNIVGQWAVTTSVDYSLAQLIQVIILLSTGGKNGGGYEASKYVVIAFHGGILFLHGIINSLPISLLSFLGQLAAIWNVIGVFVLMIVIPSVATERASAKFVFTHFNTENGEGINSKPYIFLLGLLMSQYTLTGFDASAHMTDDTKDADRNGPKGIISSVGISIVVGWGXILGITFAVTDILYLLSEDNDAGGYAIAQVFXQAFKKRSVHGSGDIINXVIVAVVIFFCGMSYVNRNSNMASAPNRDGCMPLSSLWHKVNKQEVPIYAVWLSVFISFCMALTSLGSIVAFEAMVSIATIGLYIAYAFPIFLRVTLARKHFVSGPFNLGRYGVVVGWVAVLWVLTISVLFSLPVSYPITIKTLNYTPVAVGCLLILVVSYWLISGRRWFKGPITNI

SEQ ID NO: 32993 - protein, 223 aa, Glycine max
  Clone ID: TF_GmC45046_1.pep
ANFNFIFKAVFESVFNGYSGIPRSGKALCCLGLQAHRFLALHLRLLRPGACRVILVFSCTIKCRDCTVEHCLKHRSGPDHKCPGPTKVESSFSFMNLLNGSKKQESKPKSSATSWSTSFLNAASNVRASAEAGVSKLSSWQTARGGVGQSHSSGQVEQCPQCGAKFSSVTTLVDHVQKVHERSRNRSGAKVTIDVCPKCSRGFRDPVALVEHVERDHGGSSRS

SEQ ID NO: 32994 - protein, 147 aa, Glycine max
  Clone ID: TF_GmC166190_1.pep
MAVEESEPVIGELEREENLIAAVRHIVKALGPNKTLTSDAKKILADLGTRLSSMSVPSEKEEGKQGQGKDDGDNHDALVLEQDRVDEDEKEADTAKAAWVCRVCLSSEVDITIVPCGHVLCRRCFSAVSRCPFCRLQVTKAIRIFRP

SEQ ID NO: 32995 - protein, 229 aa, Glycine max
  Clone ID: TF_GmC76336_1.pep
MLSFRLFVRALGYPRDKDGGCFQMRISYSPAAPLFLFLVQWTDYRLAGALGLLRILIYVTYGNGKNTMSIYERKASIRQFYSIIFPALLQLEKGITDLEERKQKEVYALRYQRKSEFNERRQSEIDIEREEECGVCLEVKAKVVLPNCCHYMCLKCYRDWCQRSQSCPFCRDSLKRTNSGDLWIYTDTSDIVDVGTIFKENCKMLFLYIEKLPLIVPDPRYVFYDPLLR

SEQ ID NO: 32996 - protein, 90 aa, Glycine max
  Clone ID: TF_GmC110067_1.pep
MQVETNRLTYGTNAKDDEEEDSGASSSSSEELYDEKLCCICYDEQRSSFFVPCGHCATCYDCAQRILDEESIVCPICRRLIHKVRRLYHN

SEQ ID NO: 32997 - protein, 152 aa, Glycine max
  Clone ID: TF_GmC1475_1.pep
MGLSSLPAPSEGVLCVLLVNTALSISIFKGIVRTILQIVGIRVSSLSPSPDISRNPPEPLEFNLSPSEGFIEEFRSRTPTLRFGSMCGSKQPQHECCCVCLTKFEPESEINCLSCGHIFHKVCMEKWLDYWNITCPLCRTSLMPEDDASCFW

SEQ ID NO: 32998 - protein, 731 aa, Glycine max
  unsure (1)..(731): unsure at all Xaa locations
  Clone ID: TF_GmC698_1.pep
MGSKWKKAKVALGLNLCMFVPRTLDDDSPPHTVVSERLSDATLLSPANWSTSSSRPTTPVSSFHGLKLSKSSSKSSKQTCSICLTKMKQGSGHAIFTAECSHSFHFQCIASNVKHGNQICPVCRAKWKEIPLSGPSLDPIQGRVSPSPVNWPQNDALMAVVHRVPLPLPHPHRDLNRRHVVPLYQASEPGIFDDDESLNHQHAFSERSTCNKSTEDTDAARAMEIKTFPEVSAAPGSKTYSNFTVLVHLKATAAAAAAAAKRQNLSRNQTNLAQISQTPRAPVDLVTVLDVSGSMAGTKLALLKRAMGFVIQNLGSNDRLSVIAFSSTARRLFPLCRMTDSGRQKALQAVNSLVANGGTNIAEGLRKCAKIMEDRKEKNPVASIILLSDGQDNYTVNGSGTSQPQPNYQFLLPTSISGGDNSGFQIPVHAFGFGADHDASLMHSISETSGGTFSFIETEAVLQDAFAQCIGGLLSVVVQELQVGIECTHPNLNLVSLKAGSYPSHLMADGCKGLIDVGDLYADEERDFLVSVNVPATSGNETSLIKVKNVYRDPCTQETATLESEGVKIERTENVGQVVMSLEVDRQRSRLQAAEAMAQASSAAEQGDLSRAVLILENCRKMLSETVSAKSHDRLCVALDXELKEMQERMASRHVYEASGRAYILSGLSSHSWQRATARGDSTDRSSLVQAYQTPSMAEMLTRSQAMLLGSPSGQRLLQPLVSYRPQPSPR

SEQ ID NO: 32999 - protein, 244 aa, Glycine max
  Clone ID: TF_GmC166190_2.pep
MVGKEILPQDARLVQFHPLRPFYSGEIVAWRSQHGEKLKYGKVSEDVRPSAGQALYRLKIEVSPGDTQSFLSSHVFSFKSVSASSPLKESLVHESPVLGSNRPHVDFPESSGRGESYSQVQPVRDQSGKVSAAELVQAVNEILSAAGIKMDVEKQALLQRTVNLQENLKESQAALVLEQERVQKATKEADTAKAAWICRVCLSSEVDITIVPCGHVLCRRCSSAVSRCPFCRLQVTKAIRIFRP

SEQ ID NO: 33000 - protein, 208 aa, Glycine max
  Clone ID: TF_GmC2979_142.pep
MGLGNDDDDGDTLKSFGSVCCSICLEAVTDNGDRSWAKLQCGHQFHLDCIGSAFNIKGAMQCPNCRKVEKGQWLYANGCRSYPEFSMDEWTHDEDLYDLSYSEMSFGVHWCPFGNLTRLPSSFEEGDFSSTAYHDVLGQHAIFAEHTAVSSASHPCPYIAYFGPIHPSTFNSGGTVSEASNFNHWNGPPVPGDMPTSYTFPAVDLQLY

SEQ ID NO: 33001 - protein, 417 aa, Glycine max
  Clone ID: TF_GmC2979_186.pep
MGLGNDDDDGDTHKSFGSVPCSICLEAVTDNGDRSWAKLQCGHQFHLDCIGSAFNIKGAMQCPNCRKIEKGQWLYANGCRSYPEFSMDEWTHDEDLYDVSYSEMSFGVHWCPFGNLTRLPSSFEEGDFSSIAYHDVLGQHAIFAEHTAVSSASHPCPYIAYFGPIHPSTSNSGLTVSEASNFNHWNGPPVPGDMPTSYTFPAVDLHYHSWEHNSSHFSSANSRLGTSEQTSVSPGSQRPARGGSDVPRSGSFMHPFLVGHSSAARAGNSVASSMIPPYPGSNARARDRVQALQAYYQPQQPHNSTTIRTPVASSTRRSSSHSGPVQLAPVASPPDQSAGFVYIPSGSSGRNFQEETHLPSRFHAWEREHLPSLALNNVGRESSWRAYHQTASVSDPSIRSSSFRLRHESDRMPSQNR

SEQ ID NO: 33002 - protein, 452 aa, Glycine max
  Clone ID: TF_GmC9820_1.pep
MSNRVCKFYARGACLKGDQCDFAHEKKDDICSYYKKGSCAYGSRCRYKHVKASQASSSANGRHSPVLDPVVNHTIKGTSSWVPKAVKSSSSDKRARSSQQKNLPSLENDVGQSSTSSVIPSEHLFCAFAAANCPLEDKCSRIHGNQCLYCRKFCLHPTDRKEKENHLRTCEKKEKYLQALKDSQEVECNVCLERVLSKPKPADCRFGLLPECDHAFCLSCIRNWRNSAPTSGMDISNAGTANTVRTCPVCRKLSYFVIPSGIWYSTKEEKQEIIDNYKANCKLIDCKHFNFGNGNCPFGASCFYKHTVKPGSYTWIHHRPPPQRRQNHFDVHDMLNMLQDVDLTSAEYFSIMRDSDLYDDMDPFEMMVSDRLAGDSGPCLGPFDSDEEDLDIFQMAALSEVLASGVDDFGPEDFGDEDFNPMEAALLSMMMHSNMEDEDDDDDEEEYSDEDY

SEQ ID NO: 33003 - protein, 154 aa, Glycine max
  Clone ID: TF_GmC181123_1.pep
KIGLTVVFLAFDVFFIIFCMGMACIVFIALFCIIPIIALAYAMRIREGASEEDIRSLPMYRFSLSNSLVMVDDNKKQLVKVRVDSCNGSHMSELSLHPDDSECCICLCPYVEGEELYRLPCTHHFHCGCISRWLRTKATCPLCKFNILRGDTLV

SEQ ID NO: 33004 - protein, 226 aa, Glycine max
  unsure (1)..(226): unsure at all Xaa locations
  Clone ID: TF_GmC225551_1.pep
MSNQVVKVRRDTIAACMTCPLCGKLFREATTISECLHTFCRKCIYDKITDEEIECCPICNIDLGCVPLEKLRPDHSLQDVRAKVFPLKGRKVKAPEVVTSVPLPARRKERSLSSFVVSTPRVSTQAAMTGRRTKPTRKASGLRSTSFSIEKPIKKEEDLLEDRPDSSSSPDTSYKFAQNSGQSISPCEGSQSIPYKGSENGAEPWDAKLDLWKPXNFLIEVASRSK

SEQ ID NO: 33005 - protein, 707 aa, Glycine max
  Clone ID: TF_GmC842_1.pep
MGSKWRKVKLAIGINMCVQVPKTVEHSSSSISSATPFSDRLSPSGDASGHCSVSSITSSASGLRLSRSKSNCSKGTCAICLNSMKAGQGHAIFTAECSHSFHFQCITSNVKHGNRICPVCRAKWKEVPFQSRSSKVSHGINRVNSPRNDSWTTLLGRVPTQQASTAPQLASPNNVAEPAIYDDDDEVLDQQTSVTEDMDEAVHNLVNTMEIRTYPEVSAIAKSASHDNFAVLIHLKAPPHSGRLSNNTESSAQNSRAPIDLVTVLDVSGSMSGTKIALLKRAMGFVIQNLSSSDRLSVITFSCTARRIFPLRRMTDAGKQEALQAVNSLVPNGVTNIVEGLRKGAKVFVDRKWKNPVGSIILLSDGQDSSINSSRINVVNDYRSLVPCSIHRNNGMGLHIPVHAFGFGVDHDATAMHSISEISGGTFSFIEDEDVIQDAFAQCIGGLLSVVVQQLHVEVQCVHRCLQLGSVKAGSYQTSLIDSGKMASIKVGDLYAEEEKDFLVTVNVPVDKSSDEMSLMIVRGIYRDPITKEMVGLGVNSEVKIQRPNVARDVVMSIEVDKQRNRLRATEAMAEARVKAERGDLSAAVSVLERCQQALSETISAKAGDELCISLAAEMKEMQDRMVNQRVYEQSGRAYVLSGLCAHSWQRATARGDSTDSTSFVNAYRTPSMVDMVSRSQTMLLRPPQSANAVKPARSYSDRQRRK

SEQ ID NO: 33006 - protein, 644 aa, Glycine max
  Clone ID: TF_GmC504_1.pep
FGSRGTCAICLYTMKPGQGHAIFTAECSHSFHFHCITSNVKHGNQICPVCRAKWKEVPFQSPASNMPYDRLNQVSPREEGWATVLRRLPSPQGDAARQISSLYHVTEPAIFDDDEALDQQTSVTHPKNEIDNDVINTVEIKTYPEVSSVPKSASRDAFAVLIHLKAPHSGRKQNIDANSTESSPLVENSRASVDLVTVLDVSGSMAGTKLALLKRAMGFVIQNLGPSDRLSVIAFSSTARRIFPLRQMTDTGRQQALQAVNSLVSNGGTNIAEGLRKGTKVFSDRRWKNSVSSIILLSDGQDTYTVNSRPNVGTDYLSLVPNSIHRNNGTGMQIPVHAFGFGSDHDATLMHSISEISGGTFSFIEAEDVIQDAFAQCIGGLLSVVVQELQVQVRCVHPQLQLSSVKAGSYQTSLMGNARLATISVGDLYAEEERDFLVTVNVPVDQSSDETSLLTVRCLYRDPITKEMVAGSRNSEVRILRSDVGGGELVVSIEVDRQRNRLRAAEAMAEARVAAERGDLSTAVSVLDSCHTALSETVSAKAGDRLCVALSAELKEMQERMANQRVYEQSGRAYVLSGLSSHSWQRATARGDSTDSTSLVQAYQTPSMVDMVTRSQTMVFGAPVPQNKRVLRPAKSFPERQRRQ

SEQ ID NO: 33007 - protein, 196 aa, Glycine max
  unsure (1)..(196): unsure at all Xaa locations
  Clone ID: TF_GmC504_2.pep
MGSKWRKLKLALGLDSCVHIPRAFDDSSAAAARFSGGISPTVVSPAGDTSGYRPSTPTPSSSGLWLPKSGTKSPKGTCAICLYTMKPGQGHAIFTAECSHSFHFHCITSNVKHGNQICPVCRAKWKEVPFQNPASNMPHDQLNQVSPREEGWTTVLRRLPSPQVMXSADSSLYHVTEPAIFDDDEALDQQTSVAHP

SEQ ID NO: 33008 - protein, 520 aa, Glycine max
  Clone ID: TF_GmC23859_1.pep
RFGSSDPFPIKIAENALLSFLLLLKHCKLQQDEERDNLNTFKSEKLDSVKDRILEGVLRLLFCTGVSEAIASACYKEAASVIASSRVEYTHFWDLVASGVVNSSSQARDKAVKSVEFWGLRKGSISSLYAILFTSKPIPSLQFAAYFVLSNEPVLSIAVLEDNACNSNIYAASEEDISRLDLPIEEKVHLKEEISFMVERAPYEVLDMDLLADQRVNLFLAWSLLISHLQSLPSSSSQRERLIQYIQDSATPVILDCLFQHIPVEISTVQSLKKKDAELSGGLSEASSAATRATTTGSLLFSVESLWPVELGKISSLAGAIYGLMLQVLPAYVRGWVSDLRDRNTSAVIESFTRTCCSPPLIANELSQIKKSDFRDENFSVSVSKSANEIVATYTKDETGMDLVIRLPASYPLRPVDVDCTRSLGISETKQRKWLMSMMLFVRNQNGALAEAIGIWKRNFDKEFEGVEECPICYSVIHTTNHGLPRLACKTCKHKFHSACLYKWFSTSHKSSCPLCQSPF

SEQ ID NO: 33009 - protein, 395 aa, Glycine max
  Clone ID: TF_GmC61_1.pep
MVSPSQVVKVKRNTLRPCMTCPLCHKFFKDATTISLCLHTFCRKCIYEKLSDEEMDCCPVCHIDLGCLPVEKLRPDHNLHDIRAKIFPFKRKKIKAQEVLSSISLPAKRKERSLSSLVVSAPKVSMQPGFTGKRTKSSTRKAAALRGCSFLLDESIKKEQTNGDDNMDSPMPEHSKKHKPHEDTENSVQHTEGKVDLWTPLNCLVEAANRTKSSRSNSQATPLAKLESPTTPHGGQDASETTTKTDLPASAQSELNIPKSKNKDTGLKPIFGDDKDANSLPLGPVKRRRLRPAGQKRVAASEMSASSPAPLDATGGKCNRKNSPIWFSLVASEDQKGDFPLPQISACYLRIKDGTVPVSFIQKYLMKKLNLASEAEEVKQHIASLVDIVWGLRLS

SEQ ID NO: 33010 - protein, 433 aa, Glycine max
  unsure (1)..(433): unsure at all Xaa locations
  Clone ID: TF_LIB3109-041-F10_FLI.pep
MVSPSQVVKVKRNTLRPCMTCPLCHKFFKDATTISLCLHTFCRKCIYEKLSDEEMDCCPVCHIDLGCLPVEKLRPDHNLHDIRAKIFPFKRKKIKAQEVLSSISLPAKRKERSLSSLVVSAPKVSMQPGFTGKRTKNSTRKAAALRGCSFLLDESIKKEQTNGDDNMDSPMPEHSKKHKPHEDTENSVQHTEGKVDLWTPLNCLVEAANRTKSSRSNSQATPLAKLESPTTPHGGQDASETTTKTDLPASAQSELNIPKSKNKDTGLKPIFGDDKDANSLPLGPVKRRRLRPAGQKRVAASEMSASSPAPLDATGGKCNRKNSPIWFSLVASEDQKGDFPLPQISACYLRIKDGTVPVSFIQKYLMKKLNLASEAEVEIMCRGQPVLPSLQLHNLVDLWFXTASTSKKIPASVGSSAKDFVMVLSYCRKALPP

SEQ ID NO: 33011 - protein, 358 aa, Glycine max
  Clone ID: TF_GmC5904_1.pep
SLSPQAPSLPSFISQPALSFLRALFGSPSVSASVRPSLQIDRPPDGAPGATAIPCCTVDAKSAVDGTWKTLRPGVLVSRESGDKGVILQRTQTCIYNDWKGLLGWTSDLRAICARSWRQQESTSLRKVPFLLTDVGRRPNAEYVVVNMDGSRHPLPLTTVYHKLQPITASPYTFLQALFGHEYPVGLLDEEKILPLGKDITAVGLCSLKNGIAEIKSCKYLPYFLSDLSKDQMIVDLSIKTKILFWGGIALGSMSVGVLGYAVLRNWIKWKRWKVQRQLQQQRQAVSDAEPQVDDEIEDVPDGQLCVICLMRRRRSVFIPCGHLVCCQGCAISVEREVAPKCPVCRQEIRDSVRTYES

SEQ ID NO: 33012 - protein, 150 aa, Glycine max
  unsure (1)..(150): unsure at all Xaa locations
  Clone ID: TF_GmC5904_3.pep
FKKGMLEIKSCKYLPYFLSXLSKDQMIXSFHQNKNTVWGGIALGSMSVGVLGYAVVRNWNKWKQWKQQRQLQQQRQAVSDVEPQMDDEIEDAPDGQLCVICLMRRRRSVFIPCGHLVCCQGCAISVEREVAPKCPVCRQEIRDSVRIYES

SEQ ID NO: 33013 - protein, 101 aa, Glycine max
  Clone ID: TF_GmC1470_2.pep
SRKGLGGFVPPPMATTRFGNFALSAAFGGFIPSLFNFQMHGFHDAAMYGGGAGFPHGFANTFHGVHAHGFPLRTHQGQQDYYLKKLLLFVVFCVVLAFKWQ

SEQ ID NO: 33014 - protein, 112 aa, Glycine max
  Clone ID: TF_GmC27292_3.pep
MNMTPVCPFVKAARPDDNNASKKSGENSMKHQAESESKVKKEVNDSASTSPKCPFGYDSQSFKIGPLSCTVCQALLFDTSKCVPCSHVFCKACISRFKDCPLCGADIVKIEP

SEQ ID NO: 33015 - protein, 368 aa, Glycine max
  unsure (1)..(368): unsure at all Xaa locations
  Clone ID: TF_GmC27292_1.pep
MNMTPVCPFVKASRPDDNNASKKSGENSMKHQVESESKGKKEVNDSASTSPKCPFGYDSHSFKIGPLSCTVCQALLFDTSKCVPCSHVFCKACILRFKDCPLCGADIVKIEPDANLQGVVDHFIEGHARIKRSVSSDKGEEATESKKVIYEDVSLERGSFLVQQAMRAFRAQNLESAKSRLNLCAEDIRDQLEKVGNTSELCSQLGAVLGMLGDCCRAMGDASSAVAYFEESVQFLSKFPKDDLEITHTLSVSLNKXIGDLKYYDGDLQAARSYYFKSLNVRRDVVKHNSNVPSQVLDVAVSLAKVADVDRNLGDEKLATDGFQEAIDLLESLTLKSEASGLEQRRQSVLDFLRSQLPDKQEQAEAPV

SEQ ID NO: 33016 - protein, 431 aa, Glycine max
  unsure (1)..(431): unsure at all Xaa locations
  Clone ID: TF_GmC122273_1.pep
MGNEESTHDSHDDFFRQPRSHDGSSPNTSHQYHQPPSYDGSSANTSHQYHQPSSYAGSSVNTRHQYKQRPTYIADSFSSLDQXYCTQVVSALREAGLESSNLIIGIDFTKSNEWTGKHSFNHKSLHFTGNTPNPYEQAISIIGRTLSSFDEDNLIPCFGFGDASTHDQYVFSCYPDECYCHGVEQVLARYREFVPRLLIXGPTSFAPVIDAAVGIVERSNGQYHVLVIIADGQVTRNSDTPHGKFSPQEQATINSIIAASHYPLSIILVGVGDGPWDEMQHFDDNITQRLFDNFQFVNFTKITSENKDASKKEAAFALAALMEIPIQYRITQNLQIANENPTSHQRKRPLPPPKEVIDRDNAVLAVPHVPNFESVEPSAPAAVESVCPICLTNPKDMAFGCGHTTCKECGVTLSSCPMCRQEITTRLRLYT

SEQ ID NO: 33017 - protein, 320 aa, Glycine max
  unsure (1)..(320): unsure at all Xaa locations
  Clone ID: TF_GmC83664_1.pep
MKVSILNFGSSTNQFHDHNKHACNEVTNIINPVNNEGKYSQLCDKSGRYDRLLKLSQDDLETVIRRVSRDSCLDPQKKSYIIQNLLMSRWIIRQQISSTEANIKNDELEFPGKHPSYRDPHKLIXSCNHYKRNCKLFAPXCNQLHTYIHMANEXSDHSVDRKSITXMMCMKCLVIQPISATCSTISCNLSMAKYYLSRCKLFDDEREKHLEDNCPICHEYIFTSCSPVKALPCGHVMHSTCFQEYTCFNYTCPICSKSLGDMQVYFRMLDALLAEERISDEISSQTQVLLCNDCEKKGETPFHWLYHKCPSCGSYNTRVL

SEQ ID NO: 33018 - protein, 409 aa, Glycine max
  Clone ID: TF_GmC7458_1.pep
MMTMKRLVRVNRDAIAACMTCPLCKKFLKEATAISLCLHTFCRKCIYDKITDEELENCPVCNIDLGIVPLEKMRPDNILQDLRNKIFPFKKRKEKAPVSVSSVLLPARRKERSLSSLVVSTPRVCTQSTMTGRRTKPARKASGLQGSSLSIEKFIKKEEELLSFIQNLLMKKLGLNSEDEVEIKCMGHPVLPSLQVQNLVDSWLDMAASGHRIPATMGSSGKDFVMILTYVLKAKIKEKKRKAKVEEEKISTDHASSDTSKPNKLRRVRQKKEPVFGESRISPQAVLDATDRNLLWNDSIWFSLAASENQEGDAPLPQIPSNYVRIKNGSIPVSFIQKLLMKKLGLKSEDEVEIKCMGHPVLPSLQVQNLVDLWGVDTASLGHRISATIGSSGKDFVMILTYGRKVLHP

SEQ ID NO: 33019 - protein, 171 aa, Glycine max
  Clone ID: TF_GmC122273_3.pep
HYPLSIILVGVGDGPWDEMKYFDDNITERLFDNFQFVNFTKIMSENTEASKKEATFALAALMEIPLQYRAAQNIQLNDRESVLHQHKRPLPPPNEVIHHDNARMAIPHMPNLESAESTAPAAAEPVCPICLTNPKDMAFGCGHTTCKECGSTLSSCPMCRHQITTRLRLYT

SEQ ID NO: 33020 - protein, 222 aa, Glycine max
  Clone ID: TF_GmC2979_76.pep
KQQLTWFSNACKGIPQVSPAFLQNNVPTGPPTALPVAEDTELAMAISASLQSAMQERPPFSDTQPSFEASSSSSAVNTGNHGFLGTPNPNTSDSELVQEANPDGNTQHLQSHVNASALDLNPSAPPIANEILADGPIQYPSIDLSPVDMASPDAEKLPKGEKNAGGSGSSCVICLDAPAEGACIPCGHVAGCMSCLNEVKSKKWGCPVCRAKIDQVIKLYHV

SEQ ID NO: 33021 - protein, 72 aa, Glycine max
  Clone ID: TF_GmC1254_4.pep
NNGLCIKISAQFVSKKLWFDTKWHYPQRFLPLNWCIVFHMQYKQSSLHILKLLASLARSRQYYTCKFYIMIS

SEQ ID NO: 33022 - protein, 46 aa, Glycine max
  Clone ID: TF_GmC761_3.pep
CTQDDESLTVLSCKHLYHPECINNWLKINKVCPVCSTEVSASGSNL

SEQ ID NO: 33023 - protein, 49 aa, Glycine max
  Clone ID: TF_jC-gmro02910041024d1.pep
YDDGVELRELPCGHHFHCVCVDKWLYINATCPLCKYNILKSNTLSQEEV

SEQ ID NO: 33024 - protein, 214 aa, Glycine max
  unsure (1)..(214): unsure at all Xaa locations
  Clone ID: TF_LIB4199-002-Q1-K1-E5.pep
SNLAKTPSLASFPFTTISFNVVILRVFLCSTLRCEHYKRRCKIRAPCCNQIFPCRHCHNDAANSSSNPADRHELVRRDVKQVICSVCDTEQEVAKVCSSCGVNMGEYYCEICKFYDDDTDKGQFHCDECGICRXCYSVSVQNNHSCVENSMKSFCPICLEYQFDSIKGSTILKCGHTMHMECYREMATQNQSRXPICSETIGNDVNWGILDREI

SEQ ID NO: 33025 - protein, 588 aa, Glycine max
  Clone ID: TF_GmC6407_1.pep
PRFFHNSNPSSPKSPSSFSLLKSTLRLSKSRCGICMQSARSGQGTAIFTAECSHTFHFPCIVKKHPIVTCPVCNTSWKELPVLSINNNNNDKSDKRGFKVYNDDEPLMSPTSLSRFNPIPESENEDEEQEQDNINTEFKGFHVNPLPNLHSTTVIRRNLQLSLLPEAAIVAANRNYESYVVVLKLKPPHVTKTSRRAPIDLIAVLDVGGAMSGSKLRLMKSSMRQVISSLRPTDRLSIVAFSAGSKRLLPLRRMTGGGQRSARRIVDALAAIDQTREGTPVKNDAVKKAAKVLEDRREKNAVASIVVLSDLNDSRAGNNMHKPSLVSTTRLAHLEVPVHAVRLGECSHALSDDALANFVGGLLNVVAQDVRIQLEVVSRSRAVEIAGVYSLSGRPVSLGSSDWIRLGDLYAEEEREFLVELKVPAASAGSHHVLTVRSSYRNPLTREPLIPVEQAMLVPRPHAVRSSCAKIERLRNLHVTARAVAESSRLAEHNDLSGAHHLLSSARALLLQSSKPEEEFLRWLEAEQAELQRRRQRQTQRNSRVEEKVEPLTPTSAWRAAERLAKVAIMRKSMNRVSDLHGFENARF

SEQ ID NO: 33026 - protein, 417 aa, Glycine max
  Clone ID: TF_GmC254_1.pep
MGNSHAKKRDTQFSRNVVEGRVPSPKNKTLSPSPSLEPPLPREPPPPAAMSLNKGSGKLSAKEKYALIPDNFTTLEQVTIALRKEGLESSNLVLGIDFTKSNEWTGSVSFNNRSLHAIGSTPNPYEKAISIIGKTLAPFDDDNLIPCFGFGDATTHDQEVFSFHSDHSPCHGFEEVLACYQKVVPNLRLSGPTSYAPVIEAAIDIVEKSHGQFHVLVIVADGQVTTSAASEHGELSPQEARTIKAIVDASSYPLSIILVGVGDGPWEDMKKFDDKIPARDFDNFQFVNFTDIMAKKSSPSEKEAAFALAALMEIPFQYKAATELGLLGRATGRSNKIVPRPPPAPYSQLVPPARVLSNTPTFMEDERNQMACAVCLTNAKDLAFGCGHMTCRECGHKLTNCPMCRERITSRLRVYSG

SEQ ID NO: 33027 - protein, 121 aa, Glycine max
  unsure (1)..(121): unsure at all Xaa locations
  Clone ID: TF_GmC254_2.pep
IKPLRKRNCFALAALXXIPFQYKAAIELELLGRATGRSNKIVPRPPPAPYSELVPPARVLSNMPTFMDDERNQMACAICLTNKKDLAFGCGHMTCRDCGSRLTNCPICRQRITNRLRVFSS

SEQ ID NO: 33028 - protein, 91 aa, Glycine max
  unsure (1)..(91): unsure at all Xaa locations
  Clone ID: TF_GmC254_8.pep
KSRATGRSNKIVPRPSSXPYSRLVPTARVLSNMPTFMDDERNQMTCAICLTNKKDLAFGCGHMTCRDCGSRLTNCPICRQRITNRLRVFSS

SEQ ID NO: 33029 - protein, 1729 aa, Glycine max
  Clone ID: TF_GmC23542_2.pep
MKKSSYPNPTPRRHDFHRPPPPTHGCGWAPRPAYHRPYHQWRPRFHPHAARIDRPPEPYFRVELRLGSSPLHRDDVEALIDECHSRHDTFTFYPVDDVAAVLSYRSWEQARDAVVWFWEARLAEKHDFTPTLDSNVVVVKDDVDCRLRPVFARHVKGLTEGKEVKRWMEESERLSKEISRLSSSLSKPLRLGVHNELVEKKKGLVDEKNLVERRLKEFESAMQCLLKYLEGGVDVEGVTVFRFDGGFDWKRIHCLIKRECRRLEDGLPIYAYRSDILQEIHYQQIMVLIGETGSGKSTQLVQFLADSGIGTDESIVCTQPRKIAAKSVAQRVQEESIGCYEGQSIKCCSTFSSSREFDSRIAFMTDHCLLQHYMSDNNLSGVSCIIIDEAHERSLNTDLLLTLLKSLLCRRVEMRLIIMSATADAKQLSDYFFACGIFRVLGRSFPVDIKYVPSDYAGDSGSAVVASYVSDVVRMATEVHKTEKEGTILAFLTSQIEVEWACEKFQAPSAVALPLHGKLSSDEQFRVFQNYTGKRKVIFSTNLAETSLTIPGVRYVIDSGLVKDSRFDPGSGMNVLKVCWISQSSADQRAGRAGRTEPGVCYRLYTEADYQSMDLNQEPEIRRVHLGVAVLRILALGVKDVQGFDFVDAPSPSSIDMAIRNLIQLGAIELNNDVHDLTSEGWCLVRMGIEPRLGKLILGCFKHGLGREGIILAAVMANASSIFCRVGNEFDKQRSDCLKVQFCHCDGDLFTLLSVYKEWEALPRERKNKWCWENSINAKSMRRCQDTILELETCLEREHDVVTPSYWRWDPCMPSNHDKNLKRVILFSLAENVAMYSGCNQLGYEVAQTGQHVQLHPSCSLLVFAQKPSWVVFGELLSISNQYLVCVSAFDFQSLYDLCPAPLFDVSKMEERKLLMKTLSGLGCILLKRFCGKANCNLLALVSRIRKACMDERIFIEVNVDNNEIHLYASSNDMDIALGLVNDVLEYERKWLRTECMDKFLYHGSGFSPPVALFGSGAEIKHLELEKRSLSVDVCHPNINEIDDKELLMFFEKNTSGCICAVHKFTGNTRDEDRDKWGRITFMSPDIVRRAAELDGREFCGSSLKVVPSQLGGDKTFSFPAVKARISWPRRLSRGFAIVKCDIKDVDYILRDFYNLAVGGRYVRCEVGKKSMDSVVINGLDKELSEAEISDVLRTATTRRILDFFLVRGEAVGNPPCSALEEALLKEIYPFLPKRNPHISPCRVQVFAPEPKDAFMRALITFDGRLHLEAAKALEQIEGKVLPGCLSWQKIKCQQLFHSSLTFPTPVYRVIKEQLDEVLASFRNLKGLECNLDRTFNGSHRVKITANATRTVAEVRRPLEELLRGKTIEHDSLTPAVLQLMLSRDGFSLKNSLQQETGTYILFDRHNLNLRVFGSPNMVALAQEKVIQSLLSLHEEKQLEIHLRGRDLPPDLMKQMIKNFGPDLHGLKERVPGVDLTLNIRRHIIILHGSKELKPRVEEIVFEIARSSHHLVERFGNGPSCPICLCEVEDGYRLEGCGHLFCRMCLVEQFESAIKNQGTFPVCCTHRDCGDPILLTDLRSLLFGDKLEDLFRASLGAFVATSGGTYRFCPSPDCPSIYRVADPGSAGEPFVCRACYSETCTRCHLEYHPYLSCERYKEFKEDPDSSLIEWCRGKEQVKCCSACGYVIEKVDGCNHVECKCGKHVCWVCLEFFSTSNDCYDHLRTIHLTI

SEQ ID NO: 33030 - protein, 272 aa, Glycine max
  Clone ID: TF_GmC32907_1.pep
LLEPATEKREDFGKLQYGCEHYKRRCKIRAPCCNQIFPCRHCHNDAANSSSNPADRHELVRRDVKQVICSVCDTEQEVAKVCSSCGVNMGEYYCEICKFYDDDTDKGQFHCDECGICRVGGRDKFFHCKKCCACYSVSVQNNHSCVENSMKSFCPICLEYQFDSIKGSTILKCGHTMHMECYREMATQNQYRCPICLKTIVNDMNWEYLDREIEGVHMPEEYKFEVSILCNDCNSTSTVSFHIFGHKCLQCGSYNTRRISKPKQEGLGVSGT

SEQ ID NO: 33031 - protein, 260 aa, Glycine max
  unsure (1)..(260): unsure at all Xaa locations
  Clone ID: TF_GmC145275_1.pep
AGGPFAVFLNVLNCMLGVTPGPVTYALAGPIPVKISVYWSMNMNPYNLGLSGPGSPSYYSSYAANGHLPRMEIDXAEWEYPSTIYHLXEEPATTDSPPRRDGVTNMQTIPEECSPKLHESNRRSQVIWQDNIASDKIAVEKILDPGVAARTYSKTIFXDDIKIFETLLYKFGKVVNRSNGVSRXLIYLLTYRKYKLDIXLTRKTSGKRCVIXQSAYRRGEKCPKLPCSHVYHGECITKWLSINKKCPVCNTEVFGEESTH

SEQ ID NO: 33032 - protein, 142 aa, Glycine max
  unsure (1)..(142): unsure at all Xaa locations
  Clone ID: TF_GmC1422_1.pep
SRRKRWRTPAATSGGDLAGIICSISYEPLNLISEDLQSVSICVHVFHELCLRQWLEYSSKGKKHTCPICKQGCRASDACWLYFQSVGDANDSVKPQKSFELEEDAGXLRREVNVSGLNSQVEGQTKELEGLNEKVFLFYFIF

SEQ ID NO: 33033 - protein, 651 aa, Glycine max
  unsure (1)..(651): unsure at all Xaa locations
  Clone ID: TF_GmC1040_1.pep
MGSGWRRAFCTSDPDNSTIRTKHRTQSPTPSPRSCVSLGFLSSTITELSSNSSPKFQTKTNTSNSNSPLSPKLNLSLFGNSFKFRNNCGICSNSVKTGQGTAIYTAECGHAFHFPCVVSVSHARTNVCPVCDATWNDVPLLQNNAEKQNQPIHHHRSDSVSSYDDDEPLPSPLTCSAQIAPIPEDEENDDVSEFPGFFVDPKPQSSLRQNDGGDSRSVRVKLMPECAVISVSQSHETRALVLRVKAPPVLSXRDGGGLPMDLVTVLDVGNSMSGAKLHMLKRAMRLVISSLGAADRLAVVASAADSKRLLPLRRMTAQGQRAARRVVDRLVCGHGNSVGEEAMNIAAKVLEDRRERNTLAKILLLSDGHDNANNKNQRRFLSHVSSSIRFDCIKVPVLSYGFETKRTGLMHEPLEDDFALYVDRTLSVAVHDLRIQLGFSAPAEIRAVYSCSGGPTALSTSAARLGDLYAEEEKELLVEVRVPTSALGTHHVMTLRCVNINKDPVSQEFVYGAEHVFTVVPPPKSIPICGGRVERLRNVFITSRAVAESRRLAKHNDFSSAHHLLSSARALLAQLGSAEEYVRGLEAELVELQWQKQQQRVEREARWVDESGEVLTPTSAWRAAEKLAKMARMKKSLNKVSDLHGFENARF

SEQ ID NO: 33034 - protein, 91 aa, Glycine max
  Clone ID: TF_GmC1719_4.pep
FEKKKGEFRVKVVKQILWVNGIRYELQEIYGIRNSTENDQGKCVICLSEPRDTIVLPCRHMCMCSGCAKDLRFQTDRCSICRQPVERLLEI

SEQ ID NO: 33035 - protein, 158 aa, Glycine max
  unsure (1)..(158): unsure at all Xaa locations
  Clone ID: TF_jC-gmXLIB3563P041dc12a1.pep
KEAFELGALARXXPCKHLYHSDCILPWLSMRNSCPVCRHELPSEQTAPETRVAGQIEEEAVGLTIWRLPGGGFAVGRFAGESHLPVVYTEMESDGNSNEGFRRISLAVGSGRVRESRGGGFGRIFRNLFGRIGALTRSRSLSTSLFNRRSFRAWVLGN

SEQ ID NO: 33036 - protein, 75 aa, Glycine max
  Clone ID: TF_GmC631_3.pep
MHSQNVVEMEGKTEIRMTSAAAFVEGGIQESCDDACSICLEEFCASDPSTVTTCKHEFHLQCILEWGERSSQRPI

SEQ ID NO: 33037 - protein, 245 aa, Glycine max
  Clone ID: TF_GmC54531_1.pep
MAILILSHAFGEDNVGQTIITSPSELSICSFAAAGNCPRGEKCPHIHGDLCPTCGKHCLHPFRPEEREEHMKSCENKHKHLDALKRSQEIECSVCLELVLSKPTAAECKFGLLSECDHPFCISCIRNWRSSNPTLGMDVNSTLRACPICRKLSYFVIPSVIWYSTTEEKQEIIDNYKAKLKSIDCKHFDFGEGNCPFGTSCFYKHAYRDGRLEQVVLRHLGAADGDTVIAKDIRLSDFLSNMHLR

SEQ ID NO: 33038 - protein, 209 aa, Glycine max
  Clone ID: TF_LIB4390-013-R1-K1-H10.pep
MENNAFRDRILEDNEHEEIPDSFVCCVCLDLLYKPIVLSCGHICCFWCVYNSMNCLRESQCPVCRNQYYHFPTVCQLLHFLLLKIYTAAYKRRENQTLEEEKQSGFYSPQFDPDTCESQAKFGHSGSAANEGDDGTIYYDGESDIIGTPAKGKKMPQEELSVQRKLSVADVTCTMCKQLLFHPVVLNWGHVYCQTCVINIDDEMLRCKV

SEQ ID NO: 33039 - protein, 470 aa, Glycine max
  Clone ID: TF_GmC12260_1.pep
MFLLRVHSVEEEHPLDPRTIFQSQTNNPKFSQRRGALHLFRTSSHSSPSSLLFILAVPNYLSFHDFIPFCGPHLDRLHHLLFIRNDGTEDRYSVLIEFADHFAADAFYTNFNAKKFSPAEAEVCHILFLQSVEYSKYAEAAGTPPPGCTEIPTCPVCLERLDPDTSGILTTLCDHSFDCPCVSKWTYLSCQVCRFCQQQDEKPTCFICGTLDDLWVCMICGFVGCGRYKEGHAIAFWKGTQHCYSLDFKTQQIWDYVGDSYVHRLNQDLSKIDGKLEEMNFRCMSLEGDCGMCECREDLGINGALFNSKVETIVDEYNRLLTSQLETQRQYYESLLVEAKSKMESSMSEAVEKAAASEMQDIQNELEKCTEERNAIAEVNQKLIKNQEIWRKKFKEAEEREAKSIKLMNERIIDLEEQIRDIKIFLEAQKTIDKMSDSNGIKEGTVLPVAYEQSSPGHSKRNKKSGRRRN

SEQ ID NO: 33040 - protein, 102 aa, Glycine max
  Clone ID: TF_GmC138647_1.pep
DQAEDRLQQIPACGHTFHMSCIDLWLATHTTCPLCRFSLLTTAKSSTQASDMQNNEETQAMEFSESTSPRDLETNVFQNVSGEVAISTHCIDVEGQNVQNNQ

SEQ ID NO: 33041 - protein, 110 aa, Glycine max
  Clone ID: TF_uC-gmflLIB3275P162c09a1.pep
LKASAQSAELHNQSSTSPTSDCKGAKPQRETIARLLQELDNLEDFSEKEINSNRECIVCMKDEVSIVFLPCAHQVMCASCSDEYGRKGKATCPCCRVQIQQRIRVFGASS

SEQ ID NO: 33042 - protein, 428 aa, Glycine max
  Clone ID: TF_GmC6133_2.pep
MGGQNSKEESWRQSSSVRSSSSSWSAYLDPLSSYGFNEPQPSYSSYGYEAYGGDGMVRYDSTKLERRYSRISDHYSSIDQVSEALALAGLESSNLIVGVDFTKSNEWTGKNSFNRRSLHHIGRGLNPYEQAISIIGKSLAAFDEDNLIPCFGFGDASTHDQDVFSFYPSERFCDGFEDVLSRYREIVPHLRLAGPTSFAPIIEMAMSIVEQSGGQYHVLVIIADGQVTKNVDTKHGRPSPQEQKTVDAIVAASKFPLSIILVGVGDGPWDMMKEFDDNIPARAFDNFQFVNFTEIMSKSIPPSRKEAAFALAALMEIPSQYKAAIELKLLGSRQANAPQRHALPPPRYSSHAARFEPSIPPQHGNSHPFATAPSAPSSTSDNQLCPICLSNAKDMAFGCGHQTCCECGQDLQSCPMCRSPINTRIKLY

SEQ ID NO: 33043 - protein, 107 aa, Glycine max
  unsure (1)..(107): unsure at all Xaa locations
  Clone ID: TF_9204912.pep
EGITESHVTFAKAFVEGGVQESLDDACILCLEDFCKIYPATVTNXKHEFHLHCILEWCQISFQCPMCWQPIXLEGYYIXELLEAIYLERSYMDTPFKTAASFLHPTL

SEQ ID NO: 33044 - protein, 54 aa, Glycine max
  Clone ID: TF_GmC1738_6.pep
HASGEKTTEGEDGAELHAFPCNHHFHLSCIVKWLKMNATCPLCKYNILKGNEQV

SEQ ID NO: 33045 - protein, 201 aa, Glycine max
  Clone ID: TF_GmC1722_1.pep
LLNKEFDDRFPARVLGSFRFGSSNEIMSKNIPPSRKEAAFPPQPLMEIPSQFKPGSRLNLLGGRNANAPQRVALPTPSYGSASMGISKPYGSASFGASKPYGSASFDAPKPYGSASFSSSKPSHAASFEQSAPSYYDNTDPVGTAPPAPSSSYDNQLCPICLTNSKDMAFGCGHQTCCECGQDLQSCPICRSPINTRIKLY

SEQ ID NO: 33046 - protein, 57 aa, Glycine max
  Clone ID: TF_GmC1722_3.pep
MNLLTNRIGLLQLCPICLTNSKDMAFGCGHQTCCECGQDLQSCPICRSPINTRIKLY

SEQ ID NO: 33047 - protein, 158 aa, Glycine max
  Clone ID: TF_GmC1722_4.pep
AFALSALMEILSQYKAAIELNLLGSQNANAPQRVALPTPSYGSASMGTSKPYGSASFGASTPYGSASFDAPKPFGSSKPSHPANFEQSAPSYYDNRDLVGTAPPAPSSTYDNQLCPICLTNSKDMAFGCGHQTCCECGQDLQSCPICRSPINTRIKLY

SEQ ID NO: 33048 - protein, 186 aa, Glycine max
  Clone ID: TF_GmC883_1.pep
MDSGPPANDLCSVCHGNFHIPCQANCSHWFCGNCIMLVWQHGSVGCSCKCPLCRRAISLLVPTEESLRQQQDPEVSQILSKIHAYNRFFGGQPTTLYQRLRDLPFLLHRLLREFLHPHRSLPLLIRARVFVVMIASVIYLFSPIDIIPEGILGVVGFLDDLLIVLICFLHVAALYRSVLYLRHGGS

SEQ ID NO: 33049 - protein, 497 aa, Glycine max
  Clone ID: TF_GmC247_3.pep
IRLEIERERQRELQGLLEHRAVSDFAHRNRIQSLLRGRFLRNERTVEDERPPSMAASELVQLRQRHTVSGLREGFRSRLENIVLGQAGTSPDSTSNSNASETRGDGSQANSLVDGQQENYEQQIRSLETDVRQLPNRTGTLESSTSESISWQEASNQGGNWQEQIAEEGGGNWQRSPFDQTRDGRAVSDWPQEPPRNLTGEDPHPQEAQRIWHDDNTRETVGNWSEGPSGASRNRRGVPIRRFNRFHPPDDDNVYSMELRELLSRRSVSNLLRSGFRESLDQLIQSYVERQGRAPIDWDLHRNLPTPTPASPERDPDQQGEERDEGQHETINRPSLVLPSPPVPPPQPLGHQDLHQTGWSRQSMHRSEIEWEIMNDLRSDMARLQQGMNHMQRMLEACMDMQLELQRSVRQEVSAALNRSGGENGSSAETSDDGSKWGHVKKGTCCVCCDNHIDSLLYRCGHMCTCSKCANELIRGGGKCPLCRAPILEVVRAYSIL

SEQ ID NO: 33050 - protein, 87 aa, Glycine max
  unsure (1)..(87): unsure at all Xaa locations
  Clone ID: TF_13240189.pep
MEMQIELQQSMKQEVQTVKKEEKKSNNRTPKKGNCCICYEMKVDSVLYRCGHMCTCLKCANELQWNSGKCSICXAKIEDVVRVYVDG

SEQ ID NO: 33051 - protein, 243 aa, Glycine max
  Clone ID: TF_GmC1712_1.pep
FRMWNFASNCIAGTVGLKNDSKPTHSASECSDDENSVIGREEGLECPICWESFNIVENVPYVLWCGHTLCKNCILGLQWAVVKFPTLPVQLPLFISCPWCNLLSFRLVYRGNLKFPRKNYFLLWMVESMIGDRGDVSHDSLQGGQVCHPESSSSNHYHGDTSNYLSIETLHASLRKSLVLFVHLTAKFPLIIIFLLIVLYAIPVIAAILALYILVTILFALPSFLILYFAYPSLDWLVREIIT

SEQ ID NO: 33052 - protein, 214 aa, Glycine max
  Clone ID: TF_GmC1712_3.pep
FGCEKTTEGAEPPFLSHGAATVTLLYFLLPRFSIFARNRMWNFASNCIAGTVGLKNDSKPTHSASECSDDETSVIGREEGLECPICWESFNIVENVPYVLWCGHTLCKNCILGLQWAVVKFPTLPVQLPLFISCPWCNLMSFRLVYRGNLKFPRKNYFLLWMVESMNGDRGKSHSPFCSDNQQHSIKDNLTTGSQVSHGNLRRGQVCHPETLSS

SEQ ID NO: 33053 - protein, 339 aa, Glycine max
  Clone ID: TF_GmC66639_1.pep
MIPWGGLSCCLSAAALYLLGRSSGRDAEILKSVTRVNQLKELAQLLDAEILPLIVTISGRVSSETPINCEFSGLRGVIVEETAEQHFLKHNDAGSWIQDSALMLSMSKEVPWYLDDGTDRVHVVGARGASGFALPVGIEAFEESGRSLVRGTLDYLQGLKMLGVKRIERVLPVGTSLTVVGEAAKDDVGAIRIQRPHKGPFYVSPKTIDQLIANLGKWARWYKYASVGLTVFGAYLIAKHAIRYILERRRRSELQRRVLAAAAKKSGQNNDVEKADSLSDGAKKDRLMPDLCVICLEQEYNAVFVPCGHMCCCTACSSHLTNCPLCRRQIEKVVKTFRH

SEQ ID NO: 33054 - protein, 218 aa, Glycine max
  unsure (1)..(218): unsure at all Xaa locations
  Clone ID: TF_GmC12260_3.pep
MFLLRVHSVEEDHPLDPQTIFQSQSQSQSQSQSNNPKFSERRGALHLFRTSSHSSLPTQTSLSSLLFILAVPNYLSFHDFIPFCGPHLDRFHHLLFIRNDGTEDRYSVLIEFADHFAADAFFTNFNAKKFSPAEAEVCHILFLQSVEYSEYAEVAGTPPPGCTEIPTCPVCLERLDPDTSGILTTLCDHSFDCPCVSKWTYLSCPGCQFCXAQDEKPP

SEQ ID NO: 33055 - protein, 81 aa, Glycine max
  Clone ID: TF_LIB4280-025-R1-K1-G6.pep
MEGAGMEENNIINDDDNNNKSEAHLTSAAAFVEGGIQDACDDACSICLEAFCDSDPSTVTSCKHEFHLQCILEWYYYLAFH

SEQ ID NO: 33056 - protein, 161 aa, Glycine max
  Clone ID: TF_GmC3032_1.pep
AAWKGSPWPTWDQHYHRNNWSQNDLTNQHLVIDLEIINDLRIDMARLQQRMNNMQRMLEACMDMQLELQRSIRQEVSAALNRSAGSSGIHDCESPEDKSKWECVRKGLCCICCESNIDSLLYRCGHLCTCSKCANELLQSRRKCPMCQAPVVEVIRAYSIQ

SEQ ID NO: 33057 - protein, 119 aa, Glycine max
  Clone ID: TF_GmC386821_1.pep
MAVTGTSVAAAATMLAAAAAIFITFVICFYLFLCAKRYRGAAPTIGGDRARPRFVFAGGAGCHGGLDEAAIAALPREEAAAAGGDCAVCIGELAAGEAARVLPRCGHAFHVECVDMWLR

SEQ ID NO: 33058 - protein, 176 aa, Glycine max
  unsure (1)..(176): unsure at all Xaa locations
  Clone ID: TF_jC-gmro02910011g03a1.pep
GSRADSGGDLAGIICSISHEPLNLISEDLQSVSICVHVFHELCLRQWLEYSSKGKKHTCPICKQGCRASDACWLYFQSVGDANDSVKPQKSFELEEDAGXLRREVNVSGLNSQVEGQTKELEGLNEKLCTCKEQAKIEIALKNEVLNKKASIPASNEIRGEILCSLLFYFGQVNYL

SEQ ID NO: 33059 - protein, 252 aa, Glycine max
  Clone ID: TF_GmC5878_3.pep
IELMAARDLVNSRSAVVQTVNGVNRKYNDPRAGRKGRISSRANEISGTGVDDFESRSLDADDLKIELQARKQREAALEAALAEKEFVEEQYRKKTEEAKRREEALENDLANMWVLVAKLKKDGGAVPESNINIKKVDEEAHTNDLKTNGIESDIVPKEQILDVSIPENEIANEDPLVVRLKARMKEMRDKEFKHLGNGDANSHVCKVCFESSTAAILLPCRHFCLCKSCSLACSECPICRTNISDRLFAFTS

SEQ ID NO: 33060 - protein, 157 aa, Glycine max
  Clone ID: TF_GmC5878_5.pep
RGPKKREASLENDLANMWVLVAKLKKEGGAVPESNINIKKVDEEAHKYDRKTNGIESDIVPKEQILDVSIPENEIANEDPLVVRLKARMKEMRDKEFKHLGNGDANSHVCKVCFESSTAAILLPCRHFCLCKSCSLACSECPICRTNISDRLFAFTS

SEQ ID NO: 33061 - protein, 152 aa, Glycine max
  Clone ID: TF_GmC1712_4.pep
FRMWNFASSLIAGSVGLKNDSAKPTHPASECSDDETSMVTREERLECPICWESFNIVENVPYVLWCGHTLCKNCILGLQWAVVKFPTLPIQLPLFISCPWCNLLSLRLVYRGNLKFPRKNYFLLWMVESMNGDRVKSHSTVCGGSSTSLANN

SEQ ID NO: 33062 - protein, 145 aa, Glycine max
  Clone ID: TF_GmC1712_2.pep
LRMWNFASSLIAGSVGLKNDSPKPTHSASEFSDDETSMVSREERLECPICWESFNIVENVPYVLWCGHTLCKNCILGLQWAVVNFPTLPIRLPLFISCPWCNLLSLRLVYQGNLKFPHKNYFLLWMGENMNGDRVKSHSTVCGDH

SEQ ID NO: 33063 - protein, 245 aa, Glycine max
  unsure (1)..(245): unsure at all Xaa locations
  Clone ID: TF_GmC399_5.pep
GRVGSEGRPSFVLSTCSNEMTAGSICGSSDGWSMRIFSELVASSQRERWSFDSECFGSGRHKISGSSSRFSYSPSMELQSCGACSKLLTERSTWSNQKFISNSDLSVVAVLVCGHSYHAECLEAMTSEADRYDPACPICMVGDKHLSKLLSRKGLRAESDIKAKNHKISRNRVVDSYLDGGFDVFDRQKGIDLRGKXVKMEPSSSARSSFGKPFLRRHFSLGSKWSRSLSENDSARKKGFWARYR

SEQ ID NO: 33064 - protein, 131 aa, Glycine max
  Clone ID: TF_GmC1125_1.pep
GIEGDIVKNLRIHMVRLHPRMNNMHRMLEACMDMQLELQRSIRQEVSAADDQVEFITGIHDGVSTDDKSKWECVRKGLCCICCESNIDSLLYRCGHMCTCSKCANDLLQSRRKCPMCQAPVVEVIRAYSIQ

SEQ ID NO: 33065 - protein, 85 aa, Glycine max
  unsure (1)..(85): unsure at all Xaa locations
  Clone ID: TF_GmC1125_2.pep
VSAALNRSTGSSGIHDGVXRDKSKWECVRKGLCCICCESNIDSLLYRCGHMCTCSKCANDLLQSRRKCPMCQAPVVEVIRAYSIQ

SEQ ID NO: 33066 - protein, 298 aa, Glycine max
  Clone ID: TF_GmC30762_1.pep
MKTTAEVVSSHCLVVAECSQSSPTQLSAMEPQILNLGCMHYRRRCKIRAPCCDEVFDCRHCHNEAKNSEEVDAVDRHDVPRHEIKKVICSLCDVEQDVQQYCINCGICMGKYFCTICKFFDDDISKNQYHCDECGICRTGGKDNFFHCNRCGCCYSKVMEKGHRCVEGAMHHNCPVCFEYLFDTVREISVLPCAHTIHLDCVKEMEKHQRYSCPVCSKSICDMSSVWEKLDELIASTPMPETYKNKMVWILCNDCGVNSHVQFHIVAHKCLSCNSYNTRQIQGVPATSSSSRVTEMVR

SEQ ID NO: 33067 - protein, 72 aa, Glycine max
  Clone ID: TF_GmC5878_2.pep
FQARMQEMKEKELKYLGNGDANSHVCKVCFESPTAAILLPCRHFCLCKSCSLACSECPICRTNITDRIFAFT

SEQ ID NO: 33068 - protein, 160 aa, Glycine max
  Clone ID: TF_GmC5878_4.pep
MISGAEEAKRREEALENDLANMWVLVAKLKKDGGAVPESNIDKKNDGAEHINGPKTNDVESNIVPKEHLLDAPKPDEEMPKEEPLVVRLKARMQEMKEKELKYLGNGDANSHVCKVCFESPTAAILLPCRHFCLCKSCSLACSECPICRTSITDRIFAFT

SEQ ID NO: 33069 - protein, 134 aa, Glycine max
  Clone ID: TF_GmC32907_2.pep
KGQFHCDECGICRVGGRDKFFHCKKCCACYSVSVQNNHSCVENSMKSFCPICLEYQFDSIKAPPILKCGPPMHMECYREMATQNQYRCPICLKTIVNDMNWEYLDREVCGTIIKFCFEIFFVGLCMTMFYVFEL

SEQ ID NO: 33070 - protein, 234 aa, Glycine max
  unsure (1)..(234): unsure at all Xaa locations
  Clone ID: TF_GmC137799_1.pep
MMWSFASNALTSIRLKIGSKQPSLLHSEYRALGLVLWPSREEGLECPICWESFNIVENVPYVLWCGHTLCKNCILGLQWAVVKFPTQQIKIPFFISCPWCHLLSFRIIYKGNLKYPCKNFFLLWMVESLNGDRHKVFSTCTDNQPIWSPKCNLLGSQVTNCNLRRASVXLFLDCWDLKVMFVTMMVQHTTFLILNCAVILVLHFLVTILFAISSFLVLYFAYPTIQRLVREITS

SEQ ID NO: 33071 - protein, 446 aa, Glycine max
  Clone ID: TF_GmC399_1.pep
MGSACCVAAKDPNLPNRTGDESLHRDVVCSPSGSFQWDSRGRFADEIENPSYHTSHVDSRNVSMELKGSLSSERGNLSDGGSIVENSVTPIFLKSPVDEALVANLMTPTSDLSMSSNFSTVVKNPAGTREILTRERKEDAVSHSHRIETEAPFPFSNNLYPNAVITDHLRNSTPTRWAHRSPAHPLLRQISDSRIMGLKSPDNSISEGRPSFVLSTCSNEMAAGSICGSSDGWSMRTFSELVASSQRERWSFDSECGIFLGHKISGSSSRFSYSPSMELQSCGACSKLLTERSTWSNQKFIANSDLSVVAVLVCGHSYHAECLEAMTSEADRYDPACPICMVGDKNLSKLLSRKGLRAESEMKAKNHKISRNRVVDSYLDGGFDVFDRQKDIDLRGKVSKMEPSCSARSSFGKPFLRRHFSLGSKWSRSLSENDSARKKGFWARYR

SEQ ID NO: 33072 - protein, 305 aa, Glycine max
  Clone ID: TF_GmC287_1.pep
MRCNACWREVEGRAISTTCGHLLCTDDANKILSNDGACPICDQVLSKSLMKPVDVNPNDEWVNMAMAGVSPQILMKSAYRSVMFYLGQKELEMQFKMNKIVAQCRQKCEMMQEKFTEKIEQVHTAYQKMAKKCQMMQQEIESLTKDNQELQEKFAEKSRQKRKLDEMYDQLRNEYDSVKRSAIQPADNFYSRNEHDLFSNPPNIMDGREMGRKGGLVFTPATPGPREDVWPARQNSNNSGHFDLSVGSPAKQTVIAGDAGNRRAGAHPVFGPGATNNPSMTLRNLILSPIKRPQLSRNRPQLFTL

SEQ ID NO: 33073 - protein, 76 aa, Glycine max
  Clone ID: TF_GmC5791_3.pep
EQLKISSYLNVVQVRGLPCAHNFHVECIDEWLRLNVNCPRCRCSVFPNLDLSALSNIRSESEQSSATAVTSRDMTG

SEQ ID NO: 33074 - protein, 133 aa, Glycine max
  unsure (1)..(133): unsure at all Xaa locations
  Clone ID: TF_GmC135433_1.pep
NSARWIEQDVELTHGHMRVLRLDIVNMSXEQLLALKERMGTVSTALTEETLSECVKKSVYQSSPSDKEAERCKEHKDDTTRPILQEEYVAAEEVGSLQCEHMYHVACIQQWLQLKNWCPICKASVAQSNSSPS

SEQ ID NO: 33075 - protein, 698 aa, Glycine max
  Clone ID: TF_GmC241_1.pep
TPHESDTAIALRSNSPIHWISMKNKNSRANRKARSVKPPDSCLSSSNSNKKWMVPYKFYDVKGPNSESNPNVDSSSWVLCTEVQLETILLKNIEIIYNDTVPKLVALGYSEEIAVKAILYNGHCYGANDLATNVLHNSLACLTTGTLDLSESSPAFPDMKKLQEYSLMNLVSLLKEVRPDLSRGDAMWCLLMSNFHVLKAGAIPVPVGNTCPPPPPPLPELENTGWRFAKEGGLGFPLNGLFSDTDMTIRLQRDIEFPKRFDLTPAMKSLLKRNVAMFADGFRANSKQVQPQASEFPRTGSVSKLGSSSASGTAAVLGEQPGDSHNQNDQEDLNSVMSKFLDLNIDDNVEFVPEDDKEEVIVTLVNQIKDLEKQVKERKDWAHEKAIQAAKKLSSDLIELKKFKMEREENKKLPKETGAAEELDNPTMMRLSEMENALRKTSGQMDQATAAVRKLEAEKAEIKAELEASKLSASESVTSCLQVAKREKKCLKKLLTWEKQKVKIHQDISDEKQKILEIQEELAQIKQCAKETEVTRKEELKAKEEALALIEEERRSKEAAEANHKRNLKALRLKIEIDFQRRKDDLPKAGAEIHALKAPARSTTLPTSESEDAEPQRETLAKLLLELDNVKDFSGKEINGDRECIICGKDEVSVIFLPCAHQVMCARCGKEYGKKGKAVCPCCRVPIEERIPIFGACS

SEQ ID NO: 33076 - protein, 428 aa, Glycine max
  Clone ID: TF_GmC35912_1.pep
MGGSISKRRRSRQRSASNFLPRYQQPHFPQSQDNGSVGHYGYSSQSYSGGRAPEQVKSLDRKYLRIGDDYKSLKQVTDALAKAGLESSNLIVGIDFTKSNEWTGGRSFQRRCLHHIGHEQNPYEQAISIIGKTLSSFDEDNLIPCFGFGDASTHDQEVFSFYPDERFCRGFEEVLERYRELVPQLKLAGPTSFAPVIEMAITIVEQSGGQYHVLVIIADGQVTRSVDTEHGQLSAQEKKTVEAIVKASEYPLSIILVGVGDGPWDMMKQFDDNIPARAFDNFQFVNFTEIMSKNMDRSRKETEFALAALMEIPSQYKATLELNILGACRGKDIDRIPLPPPLYGAASFNSPKTSRQYSSRPSAPSSRHDVSTNPPATSASDNQVCPICLTDPKDMAFGCGHQTCCDCGQDLELCPICRSTIDTRIKLY

SEQ ID NO: 33077 - protein, 429 aa, Glycine max
  unsure (1)..(429): unsure at all Xaa locations
  Clone ID: TF_GmC1087_3.pep
MSWRRVLNSAQALAAHTFLLCFTLFLVLKLDHNLSSSWWVIFSPLWMFHGVVARGRFSLPIVAMXAVGLKIVFLPLLTFEIIILIDNFRMCKALMPGDGENMSDEAIWETLPHFWVAISMVFFIAATVFTLLKLSGDVGALGWWDLFINFAIAECFAFLVCTKWSNPVIHRNSREASSSSSTTITYLDWNSGLVVSTDENQHQGRMCSLQDIGGHFMKVPIIVFQVLLCMHLEGTPACAVHIPLPVIFSPLFLLQGAGVMLSASKLGEKLVLLLRSGAGGGIYFRFSSRAHDCLGFLHHGSRLLGWWSIDEGSREEQARLYHEGAIGYNTFCGYPPEIVKKMPKKELAEEVWRLQAALGEQTEITKFSQQEYERLQNEKVLCRVCFEGEINVVLLPCRHRVLCSTCSEKCKKCPICRDSIAERLPVYDV

SEQ ID NO: 33078 - protein, 74 aa, Glycine max
  Clone ID: TF_jC-gmst024165h11a1.pep
GSSSSRIVLRFDQFFVHILWYQEKVLCRVCFEGEINVVLLPCRHRVLCSTCSEKCKKCPICRDSIAERLPVYDA

SEQ ID NO: 33079 - protein, 424 aa, Glycine max
  unsure (1)..(424): unsure at all Xaa locations
  Clone ID: TF_GmC1334_1.pep
MGSACCVAAKDHTIPSTSRTGGESLNRNAXRVAGEIEDPSFHTSRRVSRNVSMELKGSLSSERGNLSDWGSTLDNSVTPLSLKSPVREHLVTSQMTPSSGLSMSSNCSAVVKNLIESPEIAESSIPNRSVPSVFSIPTTDPMTNHNYHNLPNSTPSRWAHCSPGHPLLTQISDSRILGLKSPDNSISEGRPSFVLSNCSNDMATASQCGPVIGWSMRTFSGWVAPSQVEGCPLATVFSGSARPKIRGSSSRFSYSPSMDLQSCGACSKLLTDRSAWGSQKFIASSDLSVVAVLVCGHVYHAECLETITPEADSYDPACPICMVGEKYMSKLSKKGLWTESETKTKNYKISRNRVVDSYVDGGNDVFDRLKDIVSKMEPSSSSTRSSFGKPFLRRHFSLGSKWSRSLLENDSARKKGFWARCRRD

SEQ ID NO: 33080 - protein, 52 aa, Glycine max
  Clone ID: TF_LIB4164-010-Q1-N1-H1.pep
CVIRRVAYRDGETLTVMSCKHLNHPECIHNWLKIDKVCPVCRPEVFASGSNL

SEQ ID NO: 33081 - protein, 74 aa, Glycine max
  Clone ID: TF_GmC1151_1.pep
SEFSEEEEIRCMANCKHIFHCACVDRWIDHDQKTCPLCRSTLVPHQKLEEYNQRLWAASGVSQFYYQDDYTASL

SEQ ID NO: 33082 - protein, 304 aa, Glycine max
  unsure (1)..(304): unsure at all Xaa locations
  Clone ID: TF_GmC6780_1.pep
MPQRHSKNNNDLAFFTYDEKRKLGYGTQKERLGKDSIKPFDACSLCLKSLIDPMSCQKGHLFCKECILQCLLSQKKDIQRKLAAHAAQQKQEKEEEEEKLKLQKAKELDAFDQQNHGAVPQYSDRNYSRDKNGFHGANSVKVTSYEEEALRTMKAFWLPSATPEASIKVDAPSNSTICPEGNEKLKLKTLFPVQFTEDTTEQKKXKALDKTYICPSCKVTLTNTMSLVALSTCGHVFCKKCADRFMAVDKVCLVCNKACKERNLVNLEKGGTGFAGHGDHLEARDFKHLGSGSGLGLVRPAMKT

SEQ ID NO: 33083 - protein, 111 aa, Glycine max
  Clone ID: TF_GmC6780_2.pep
QFTEDTSELKKFKALDKTYICPSCKVTLTNTMSLVALSTCGHVFCKKCADRFMAVDKVCLVCNKACKERNLVNLEKGGTGFAGHGDHLEATDFKHLGSGSGLGLVRPAMKT

SEQ ID NO: 33084 - protein, 330 aa, Glycine max
  Clone ID: TF_GmC76377_1.pep
MTLPSHDAWIHTSHTLLPRWKSLSLPHQQSTLPISISRVNQVDAARLDVEMSAMLKEQLVKVFSLMKPGMLFQYEAELDAFLEFLIWRFSIWVDKPTPGIALMNLRYRDERAVEPRDKVRTGLEGPGLTVAQNGCERIADVGGQYIWARLQSFSAFRRWGDTEQRPLARRLWILIQRIEGIYRAASFGNLLIFLCTGRYRNLIERALRARLVYGSPNMNRAVSFEYMNRQLVWNEFSEMLLLLLPLLNSSSVKNLLRPFSKDKSLSSAEDGSACPICQATPTIPYVALPCQHRYCYYCLRTRCAAAPSFRCSRCSEPVVAMQRHGGVPSE

SEQ ID NO: 33085 - protein, 119 aa, Glycine max
  Clone ID: TF_uC-gmroLIB3259P253e08a1.pep
VYGSPNMIRAVSFEYMNRQLVWNEFSEMLLLLLPLLNSSSVKNLLRPFSKDKSSGSAEDGTACPICQATPTIPYVALPCQHRYCYYCLRTRCAAAPSFRCSRCSEPVVAMQRLGGVPTE

SEQ ID NO: 33086 - protein, 188 aa, Glycine max
  Clone ID: TF_GmC74179_1.pep
PTDEGTRGRTRGRTRGQGAGVCPAAYRLIEKIVLLLYCGDIPERYSAIASKSRECFGFFRRGSRLLGWWSIDEGSREEEARLFCAGSPGYNTFTPDTVKKMPRADLVEEIWRLQAALGEQTQVTKFSQDEYERLQNEKILCRICFEEQINVVLLPCRHHILCSTCCEKCKRCPVCRGPIEERMPVYDV

SEQ ID NO: 33087 - protein, 325 aa, Glycine max
  unsure (1)..(325): unsure at all Xaa locations
  Clone ID: TF_GmC74179_2.pep
GSEFGSSSSRSSRFHRMCRALVPGDDENLTDEAVWETLAHFWISISMVFFIAATVFTLLKICGDVAALGWWDLFINFGIAQCFAFLVCTKWHNPTIHGGCHITEPCSSSNTIRYLDLRTGGLVVYTDEDRQQNGFCNLQDIGGHIMKIPFIGFQILLFMHLEGTPSSAKNLPHWVIFSPLFLLQGAGVLFAAYRLIEKIVLLLYFGDIPERYSAIASKSRECFGFFRHGSRLLGWWSIYEGSREEEARLFCAGSPGSVLYPQEVKXEYERLQNEKILCRICFEEQINVVLLPCRHHILCSTCCEKCKRCPVCRGPIEERMPVYDV

SEQ ID NO: 33088 - protein, 72 aa, Glycine max
  Clone ID: TF_21602652.pep
KRLVQCILYNNCENTPNSFESPLLNILLHISNTSSILSLLFLILLFCHSNFLVLIYNNFKGRGYYSVTTIAK

SEQ ID NO: 33089 - protein, 96 aa, Glycine max
  Clone ID: TF_GmC1149_5.pep
VTQPFCFFGQLPFSSINLCIVFHIQYKQEFSFFAVNYHFIFQNSCILCEESAIICYRVKVYIRAETFAYYTQELPCLRAVIIIFLFWVFNEVVSVT

SEQ ID NO: 33090 - protein, 85 aa, Glycine max
  unsure (1)..(85): unsure at all Xaa locations
  Clone ID: TF_700973284H1.pep
QTRGASSESINALPTYKFKMKRNKSKGESNSAVGEGGVVAAXTEKERMISGEDAACCICLAKYENNDELRELPCSHLFHKDCVDK

SEQ ID NO: 33091 - protein, 111 aa, Glycine max
  Clone ID: TF_LIB3093-023-Q1-K1-C5.pep
DLFTSSATVRALPCGHYMHSCCFQAYTCSHYTCPICSKSLGDMAVYFGMLDALLAAEELPEEYRDRYQDILCHDCDRKGTSRFHWLYHKCGSCGSYNTRVIKSEAANSSCL

SEQ ID NO: 33092 - protein, 67 aa, Glycine max
  Clone ID: TF_LIB3093-047-Q1-K1-B9.pep
MEADFVTSDMLTLTQDAFYANDNDDVAVEGERCGICMDMVIDRGLLDCCQHWFCFVCIDNWATITNL

SEQ ID NO: 33093 - protein, 124 aa, Glycine max
  unsure (1)..(124): unsure at all Xaa locations
  Clone ID: TF_GmC76829_1.pep
MTTEPDVESKYAHNGKGMVGTAILLFILIIIIIFFHTYVRSCRRRRRFSHSLPTNSSAAASLDDPCLDPSIIKSLPTFTFFRRLPPLSXDCAVCLSEFSDRDEGRVLPNWKHSFHAHCIDTWDR

SEQ ID NO: 33094 - protein, 120 aa, Glycine max
  Clone ID: TF_6455111.pep
SPWSSRRIVRSGDMPTIGVLPCCHAFHAECLEQATPKTRKSDPPCPVCVKLEENSPDQRSHLRLRTGFPKLKSSRDNGPSRPWGCVQVSDCVERALHAPPSNTMLLLNQNRIKNPSLKRI

SEQ ID NO: 33095 - protein, 49 aa, Glycine max
  unsure (1)..(49): unsure at all Xaa locations
  Clone ID: TF_LIB3087-010-Q1-K1-D12.pep
MLHLEKLDLELKSPLCLSXHKRPVLLPCNHSYCNTCLADCITAGPRCAV

SEQ ID NO: 33096 - protein, 118 aa, Glycine max
  Clone ID: TF_GmC1579_1.pep
MATLDSDVTVVPAGEASTSAGPSSSTKKPKRFEIKKWNAVSLWAWDIVVDNCAICRNHIMDLCIECQANQASATSEECTVAWGVCNHAFHFHCISRWLKTRQVCPLDNSEWEFQKYGH

SEQ ID NO: 33097 - protein, 118 aa, Glycine max
  Clone ID: TF_GmC1579_2.pep
MATLDSDVTVFPAGEASSSAGPSSSTKKPKRFEIKKWNAVSLWAWDIVVDNCAICRNHIMDLCIECQANQASATSEECTVAWGVCNHAFHFHCISRWLKTRQVCPLDNSEWEFQKYGH

SEQ ID NO: 33098 - protein, 300 aa, Glycine max
  unsure (1)..(300): unsure at all Xaa locations
  Clone ID: TF_GmC1361_2.pep
MMEWPSFSFGSSQIRKHFLIFPFPVSHPNLMEGSVNERLDFGKMGYGCNHYRRRCRIRAPCCNEIYSCRHCHNDAASLLKNPFDRHELVRQDVKQVVCSVCDTEQPVAQVCTNCGVKMGEYFCNICKFFDDDVEKEQFHCDDCGICRVGGRDNFFHCKKCGSCYAIGLRDNHLCVENSMRHHCPICYEYLFDSLKDTFDXIVMKCGHTMHHECYLEMIKNDKYCCPICSKSVIDMSKTWKRIDEEIEATVMPEDYRNRKVWILCNDCNDTTEVYFHILGQKCGHCRSYNTRAVAPPVLPQ

SEQ ID NO: 33099 - protein, 36 aa, Glycine max
  Clone ID: TF_700875744H1.pep
EEYENMDDVGTLQTCGHIYHVSCIIPWLTMKSFCPI

SEQ ID NO: 33100 - protein, 160 aa, Glycine max
  Clone ID: TF_GmC1714_1.pep
MGFPVGYTELMLPKVFLQVLSVLGLIRKLITVLLCYMGFHDFFESDIAWPERAPEFQSVWAVLIREILPVVKFSEMEMEMAEAPESCAVCLYEFEGEDEIRRLTNCRHIFHRGCLDRWMGYDQRTCPLCRTPFIPHHMQAAFNDRLWAASGIPDFYYNHE

SEQ ID NO: 33101 - protein, 329 aa, Glycine max
  Clone ID: TF_GmC266_1.pep
MASFPSNSAWEHSMASAQQNSNPHASSPSFMTRVAMRISRSRWFTFLRRVFHYQNGPRSNLGSNPFNSSTWMMLELIALLVQIASTTFTLAISKSEKPIWPMRVWIAGYDIGCVLNLLLLCGRYHQLHVTQGNNALSLSELEQQRNNEESSVYRTSHLIDKCRSSLELFFAIWFVMGNVWAFDSRFGSFPQAPKLQVLCIILLSWNAICYSFPFLLFLLLCCCVPLMSTLLGYNMSMGSSARGASDDQISQLPSWRYKGLHSNLDIANDSQSSERLINQDPECCICLAKYKDKEEVRQLPCSHLFHLKCVDQWLRIISCCPLCKQGLQR

SEQ ID NO: 33102 - protein, 185 aa, Glycine max
  Clone ID: TF_GmC266_4.pep
INLVPCSVYRSSHLIDKCRSSLELFFAIWFVMGNVWAFDSRFGSFPQAPKLQVLCIILLSWNAICYSFPFLLFLLLCCCVPLMSTLLGYNMSMGSSARGASEDQISQLPSWRYKGVHTNLDLGNDSQSSERLINEDPECCICLAKYKDKEEVRQLPCSHLFHLKCVDQWLRIISCCPLCKQGLQR

SEQ ID NO: 33103 - protein, 419 aa, Glycine max
  Clone ID: TF_GmC668_1.pep
MNQLGGVSVILLVLSVLCFHVRAQTSAPSSGDAVSNFQPSLAVVIGILGVMFLLTFFLLMYAKFCHRRHGGASAVGDSENQLTFVRSRSRFSGIDKTVIESLPFFRFSALKGLKEGLECAVCLSKFEDVEILRLVPKCKHAFHIDCIDHWLEKHSTCPICRHRVNPEDHTTFTYSNSLRMLAGEESNIEILVQREEEEHHGSSRFSVIGSSSFRKTVKEEELLIQKGAEDSDGNQKGYHKHNHRITISDVVFKHRWSNVSSSDLMFLNSEMLNDTSSNRFSSNLESITRGVVVENEQIMNIKEEMERKISFENKVVGALNNIVSDHKEDPPFTSDSAPKYVNPGEKRSMSEITAVSRFGDLGMKMRVLKDSDSLQNNLKEERMRQIWFPIARRTAQWFVNREERRSLQSQNNKQQPLDV

SEQ ID NO: 33104 - protein, 215 aa, Glycine max
  unsure (1)..(215): unsure at all Xaa locations
  Clone ID: TF_GmC153_1.pep
METGIIQGPWGFRSLSKFVLCTISGALTVCFALAGALTGAIAGALAAKATKSGLLRGVSLGAIAGSILSVEVLEASRAYWCMEQTGSRSASSMADFIEELVRGRLVEESLTPAILTAYNLQFEQVGIANTGYVETHDVHGLVAPRETCXPLRSYDGVTPPMISKAENTCCAICLQDIEVGEIARSLPRCHHTFHLICVDKWLVKNDSCPVCRQNV

SEQ ID NO: 33105 - protein, 209 aa, Glycine max
  Clone ID: TF_GmC627392_1.pep
MDPHLPKNGTQQHHGTPTPSPASVANNIIIPHPEFRIPSFKEHHKNVPQLAMIVMACMVGVIMFLCAVSVLIRYFYSRRYSRNNQNRRVDAPILFDLNGDSPPSSDNDDDVEELAVVHPIWYIRTVGLQQSLIDSITVFRYKRGEGIIDGTECSVCLGEFEHDESLRLLPRCSHAFHIPCVDTWLRSHKNCPLCRAPVLRDETDGAHVI

SEQ ID NO: 33106 - protein, 299 aa, Glycine max
  Clone ID: TF_GmC938_2.pep
MSSGGGGGGAKPFFCHVCSQRITCSDESEPFCPICMESFVEECNPNNPNPNLFTENEESSDSEISFSLLPLFLSSVSRSRPEPDMFDPMVFLQNHIQGLRADGANIQVDFGHPSEQQGFRLPANIGDYFMGPGLEQFIQQLADNDPNRYGTPPAAKDAVENLPTITVDDELLNSELNQCAVCQDEFEKGSLVTQMPCKHAYHGDCLIPWLRLHNSCPVCRYELPTDDAEFGSSEVRGNGGDGGSRTGGSGDSGGGSCGGGGGGSNRPVRRTVRIYLRHPDAADSAQDSAERGWEWGSWD

SEQ ID NO: 33107 - protein, 105 aa, Glycine max
  Clone ID: TF_uC-gmflLIB3275P147a09a1.pep
QKAAFAYSGSSSMQQTSSSTPAEKKQDNSTAVGSMKASDDELTCSVCLEQVDVGDVLRSLPCLHQFHANCIDPWLRQQGTCPVCKFRAGSGWSDNGHNDIIADMV

SEQ ID NO: 33108 - protein, 217 aa, Glycine max
  Clone ID: TF_LIB5118-056-A1-PF1-F7.pep
HFPHSIFHHDLLFLFYFFLLTEFPPQATAQPPNTLTPPPQQDRFTRLKFDKSMAIVLLILVVVFFILGFLSVYTRQCAERRMGGRFDLSILISRRQRGLGREVIETFPTFVYSTVKSLKIGRATLECAVCLNEFEEDETLRFIPNCSHVFHSDCIDAWLANHSTCPVCRANLTSKPDDRCSAPIQNPDPEQPVLTSSTRPETVGADLLSQNRTPPRP

SEQ ID NO: 33109 - protein, 129 aa, Glycine max
  Clone ID: TF_LIB4390-049-R1-N1-G9.pep
MTLPPKRYARRVSLYYRNNAAKPLKEKQRENDEDSKSCAICLEDFDPNEEVMLTPCNHMFHEDCIVPWLTSKGQCPVCRFVICEIGRGNHSSFNNNDIANLEPSNLINGELLSILRAMEKAFQLGSMTY

SEQ ID NO: 33110 - protein, 273 aa, Glycine max
  unsure (1)..(273): unsure at all Xaa locations
  Clone ID: TF_GmC1689_1.pep
MEGGRRRITLYDQMKAGNSSRYSLASLMLGDVVFKKVEAEEAEEAEAEAEASCELSRSRTLQDIIREEKPSNSSNNTKDRNSWRAFTAKLRLKRAIGSAWSSTTTITNHSNDDRNLPNIPETRHDSDELTQQNDIVVDGANDSDPIAPAGSPVEHVEAVGNSSDGENNHEAVVGVSLMDLLXEAKQEMDLYRVSDDDDDVAEYEKREEEKGTAARRLQRGVEYNCCVCMVRHKGAAFIPCGHTFCRTCSREIWVSRGNCPLCNNLILEILDIF

SEQ ID NO: 33111 - protein, 344 aa, Glycine max
  Clone ID: TF_GmC1738_1.pep
MSSPNSVPQSHAPLLLPRPDAAARLPILALLLGRRGHSAVVRETAARELEERRADWTYSKPVVALDMTWNMAFVLVSAVMLACTVKENPNTPIRWWICGYALQCLVHVALVWLEYRRRNDAPRDEESAASLQYDDVNDSDEDDVGTSGSSSSSGFTKRCASLNTMISLLWWMVGFYWVVSGGDILLQDAPRLYWLSVVFLAFDVFFAIFCVVLACLIGIALCCCLPCIIAILYAVAGQEGASESDLSILPKYRFQLLSNEETPGEGGGSMIPMETSNGYSVNERTLSPEDAECCICISSYEDGAELHVLPCNHHFHSTCIVKWLKMNATCPLCKYNILKGNEQV

SEQ ID NO: 33112 - protein, 340 aa, Glycine max
  Clone ID: TF_GmC5691_2.pep
GRVGGILIRSLGFLLDMATFPMALGHYLYIWRLHGMAFHLIDALLFLNIRALLSAIINRIKGFIRLRIALGTLHAALPDVTTEELRAYDDECAICREPMAKAKRLNCNHLFHLACLRSWLDQGLAEMYTCPTCRKPLFAGVPGNETNSDAGTISSDEQLARQISAGLDRPNSARHTMPTGFYPNQTLNTPEGVPWRGAGLDSGWLHSWPNQGVDGAGPSTAIRTVGLGRVQMMMRHLASGGETYAQTTLEDTAWNLWPINPSQASASGSTIPPPGGRLPERTGSLHLRTASQSSNDNVANILAMAETVREVLPHIPDDMIFQDLQRTNSVTVTVNNLLQM

SEQ ID NO: 33113 - protein, 257 aa, Glycine max
  Clone ID: TF_GmC1201_1.pep
VWMAAVLCRARDFRRQRPALTGVGYLLLLVRASVGFALHVVGVYWWYQNDDLMYPLIMLPPKDIPPFWHAIFIIMVNDTLVRQAAMVFKCILLMYYKNSRGRNYRKQGQMLTLVEYLLLLYRALLPTPVWYRFFLNKEYGSLFSSLMTGLYLTFKLTSVVEKVQSFFAAVKALSRKEMHYGAYATSEQVNAAGDLCAICQEKMHAPILLRCKHIFCEDCVSEWFERERTCPLCRALVKPADLRSFGDGSTSLFFQLF

SEQ ID NO: 33114 - protein, 314 aa, Glycine max
  Clone ID: TF_GmC6412_1.pep
MNSDTTSYWCYSCTRFVHIQEQNDVVCPRCHGGFVEKVTAPQSSRQGFRRRRRNAGNHSAFNPVIVLRGPGEDEESSFELYYDGFDGEGLRPLPSTMSEFLLGSGFDRLLEQVSQIEINGLGRAENPPASKAAIESMPTVEITESHVASETICAVCKEAFELGALAREMPCKHLYHSDCILPWLSMRNSCPVCRHELPSEQTAPETRVAGQIEEEAVGLTIWRLPGGGFAVGRFAGESHLPVVYTEMESDGNSNEGSRRISLAVGSGRVRESRGGGFGRIFRNLFGRIGALTRSRSLSTSLFNRRSSRAWVLGN

SEQ ID NO: 33115 - protein, 215 aa, Glycine max
  Clone ID: TF_GmC196244_1.pep
MDGSGHYVSLAQFDDDGISMAKHLESANTMFSFIWWVVGFYWVSADSESLVRDSPLLYWLCIAFLGFDVFFVVFCMALACIVGIAVCDRPSGIIALLYAVADQEGASKEDIEQLSKFKFQRTETNEKHAGNTQGAAGGIMIECDADSPIEHVLSDEDAECCICLSAYDDGVELRKLPCSHHFHCACVDKWLHINATCPLCKYNILKSTSHGQDEV

SEQ ID NO: 33116 - protein, 262 aa, Glycine max
  Clone ID: TF_GmC41583_2.pep
MLELSESHSKNLHFPLTHIILFFTCFKLSKAQSSMEPVPTYITHHSWEPSVVITVGAIIIALLLMGIISIYLRRCAESHIIITTTQTTTTLPCSCAQGINRELLNTFPTLFYSNIKDLKKGNETLECAVCLTDFTDKDALRLLPKCNHVFHPHCIDSWLACHVTCPVCRANLSQESSHVSITVPPHNEEEGSRNTTTNEATQIEQSTSNDVGQVCLGDPTPTSDAAIMYISEEQQQQHSSSEPTFEELDPTILLLLLLTMVA

SEQ ID NO: 33117 - protein, 71 aa, Glycine max
  Clone ID: TF_uC-gmroLIB3258100e08a1.pep
PKITEKALLMGNKCPVCLDKIETKQPVGVVPGCNHPFHLECADTWLSKHPFCPFCRAKLDPSLFSSSQNPC

SEQ ID NO: 33118 - protein, 278 aa, Glycine max
  unsure (1)..(278): unsure at all Xaa locations
  Clone ID: TF_GmC552_1.pep
MWSAYLEKNRVNQQTTKISMTCKREDIWSHGCQHYRRRCRIRAPCCNEIFDCRHCHNEAKNDINIDQKHRHDIPRHQVKQVICSLCGTEQEVQQNCINCGGLYGTSTSVETCKLFDDDISKQQYHCSGCGICRTGGSENFFHCYKCDCCYSTNSEKQSPLCSRXQLHLDCPVCFEYLFISANDVTVMPCGHTXHKSFLNEMREHFQYSCPLCLXSVCDMSKVWEKFDMEIAATRMPEQYQXIKWFWILCNDCGKTSHVQFHFVAQKCPNCKSYNTRQT

SEQ ID NO: 33119 - protein, 139 aa, Glycine max
  Clone ID: TF_GmC552_10.pep
DNFFHCYKCGCCYSTLLKNSHPCVEGAMHHDCPVCFEYLFESRNDVTVMPCGHTIHKSCLNEMREHFQYSCPLCLKSVCDMSKVWEKFDIEIAATPMPEQYQNKMGWILCNDWGKTSHVQFHFVDQKCPNCKSYNTRQT

SEQ ID NO: 33120 - protein, 385 aa, Glycine max
  Clone ID: TF_GmC271926_1.pep
MKIPNTILKLFLFILLNPSQIAIALASIEACLDSVCQTHEPVIRFPFRIEGEQENSCGHPGFSVSCNHNGQTLLNLSYCGEELRIQRINYAAQQLWVNDPNNCLPKRLLSLNLSASPFDAVYRQKFTFFNCSFNLEYLVRRYRPISCLSDSPKYLVFATPSSTVFGHLSSVCDLVATVTVPVQSPFNDRVTSSELSDDLRFSWDSPSCGRCESHGGRCGFKSNETFELDCSLVPSKGISHGARYAIVICIGATALLCCMGVLRCIHSWLRIGNQDGPWANETVPDFEALAGSRPTTVTGLDRPTIESYPKIVLGENRGLPKKGDKTCSICLSEYIPKETVKTIPECGHCFHAQCIDEWLPLNASCPICRTSPRKLPQPRARSSPQ

SEQ ID NO: 33121 - protein, 108 aa, Glycine max
  Clone ID: TF_GmC1196_1.pep
SLLGSSEEKLQCTVCLEDVEVGSEAKEMPCKHKFHGDCIVSWLKLHGSCPVCRFQMPSEDSTLEANVGVGNGDNQNSELVRAGEERPRNGRRNWFPVLQSFNNFLPYP

SEQ ID NO: 33122 - protein, 166 aa, Glycine max
  Clone ID: TF_GmC310374_1.pep
TTQPIPDSSAPTTSGFGMGIGISIGILLLITTITLTSYFCTRSQVPTPPRRRTTSNSNPQFLEPHHTIVDVGLDEATIMNYPKMLYSEAKLRKFDSTSTSCSICLGDYKGSDFLRVLPDCDHVFHLKCIDPWLRLHPTCPLCRTSPIPTPLSTPLAEVVPLATRRD

SEQ ID NO: 33123 - protein, 231 aa, Glycine max
  Clone ID: TF_GmC1470_1.pep
MASGFGESTGRSPPSPSYFNNNNNNDAANFECNICFELAQDPIITLCGHLFCWPCLYKWLHFHSQSRECPVCKALVEEEKLVPLYGRGKSSTDPRSKSIPGDNIPHRPAGQRPETAPPPETNHFHQHGFGFMGGLGGFAPPPMATTRFGNFALSAAFGGFIPSLFNFQLHGFHDAAMYGGGAGFPHGFANTFHGVHAHGFPLRTHQGQQDYYLKKLLLFVVLCVVLAFIWQ

SEQ ID NO: 33124 - protein, 170 aa, Glycine max
  Clone ID: TF_GmC1470_3.pep
MASGFGESTGRSPPSPSYFNNNNNNDAANFECNICFELAQDPIITLCGHLFCWPCLYKWLHFHSQSRECPVCKALVEEEKLVPLYGRGKSSTDPRSKSIPGDNIPHRPAGQRPETAPPPETNHFHQHGFGFMGGLGGFAPPPMATTRFGNFALSAAFGGFIPSLFNFTVA

SEQ ID NO: 33125 - protein, 131 aa, Glycine max
  Clone ID: TF_jC-gmXLIB3563P066aa12a1.pep
MASGFGESTGRSPPSPSYFNNNNNSDAANFECNICFELAQDPIITLCGHLFCWPCLYKWLHFHSQSRECPVCKALVEEEKLVPLYGRGKSSTDPRSKSIPGVNIPHRPAGQRPETAPPPETNHFHQHGFGF

SEQ ID NO: 33126 - protein, 136 aa, Glycine max
  Clone ID: TF_GmC1231_1.pep
ARNSARAPPAQKEAIEALPTVIINENSQCSVCLDDFEVGSEAKEMPCKHRFHSGCILPWLELHSSCPVCRLQLPLDESKQDSDLSRDSRSQREDESIEHDNDEERDGEGRNASGGRRFSFPWPFNGLFSSSNSSSS

SEQ ID NO: 33127 - protein, 113 aa, Glycine max
  unsure (1)..(113): unsure at all Xaa locations
  Clone ID: TF_GmC187_2.pep
TFMRIEPXRAWCVCLPVFIGLQAAILLLQHYLGSRWFIPRQILPEKYSYYRRFDQDTRHATDCVICMTAIDLSQRSNDCMVTPCDHFFHSGCLQRWMDIKMECPTCRRPLPPA

SEQ ID NO: 33128 - protein, 229 aa, Glycine max
  Clone ID: TF_GmC999_4.pep
MGSVCCCLSFDDFEDYVNPNSPVYRNCVCLSCLIQNLLSVYSSIFRRGDAHSIPSSIQGAASITSAASLDNSLSDMYRSPPRPLPYDAEPRYFRSQRDGLVSRREKGSSHSNEETEPLRSDADVDPESLNSGDKWNESACEAGSKEYHSKSSLRLQSTKYSTGVGLVYASSEEEDVCPTCLEEYTKENPKIMTKCSHHFHLGCIYEWMERSDNCPVCGKVMVFDETTFT

SEQ ID NO: 33129 - protein, 87 aa, Glycine max
  Clone ID: TF_GmC1738_4.pep
NEETPGEGGGGSMIPMETSNGYSVNERTLSPEDAECCICISSYEDGAELHVIPCNHHFHYTCIVKWLKMNATCPLCKYNILKGNEQV

SEQ ID NO: 33130 - protein, 199 aa, Glycine max
  Clone ID: TF_GmC249_1.pep
TNGEFPISSFFSSMSSFNPFSPPPPTPYLTNLGFGYSIAIALGVLFLLSTLILSSYLCCRTLRHRNNNRHTPRNNTSDGIVLPRVIFVAEDDDDDATRQNDAVTGLDQAVINSYPKFPYVKEGDYDSTCSICLCEYKDSEMLRMMPECRHYFHLCCLDPWLKLNGSCPVCRNSPMPTPLSTPLQEVVPLSQYADARARR

SEQ ID NO: 33131 - protein, 177 aa, Glycine max
  Clone ID: TF_jC-gmfl02220056h06_FLI.pep
ATTTPYLTNLGFGYSIAIALGVLFLLSTLILSSYLCCRTLRRRNNNNNRRHTPDGVVLPRVIFVPEDEDDDDDDTRQNDVATGLDQAVINSYPKFPFVKEGNYDSTCSICLCEYKDSEMLRMMPECRHYFHLCCLDPWLKLNGSCPVCRNSPMPTPLSTPLQEVVPLSQYADARARR

SEQ ID NO: 33132 - protein, 260 aa, Glycine max
  Clone ID: TF_GmC150616_1.pep
MGDSSAANDHLGESPAVELTGKIMIVVIIIMFFVIVIALCLHLFARNFWWRSPAPQSRSHRRRRFVFSSGPDGGSGLDPAVLSSLPVLVFEGHAQEFKDGLECAVCLSEVVEGEKARLLPKCNHGFHVACIDMWFQSHSTCPLCRNPVASSEESSESPTFPTNVLVWGNQAQISSTGGGGASLEEGSSSSSSASTCDDHGMLVIDIPSEMTSTSLSPEDDVKSPMTGRLRSLKRLLSRDKRFNPSSPTSSPDVQQPGSGS

SEQ ID NO: 33133 - protein, 236 aa, Glycine max
  Clone ID: TF_GmC35324_1.pep
MYSVASTSLTSPLLHDLENFHYSRRLLLHSPYLNQSAKPPRSSHDSSTETYLGDGNFDANVVMVLSVLLCALICSLGLNSIIRCALRCSNFVVSDSVATNNNNNNPPAARVANTGVKKKALKTFTTVSYSAELNLPSLDSECVICLSEFTSGEKVRILPKCNHGFHIRCIDKWLSSHSSCPKCRQCLIETCQKIVGCSTQQASSSQQHVLAVPETIVTIIAPLEPEGLVRNYRELS

SEQ ID NO: 33134 - protein, 242 aa, Glycine max
  Clone ID: TF_GmC23999_3.pep
KYTRSLKVIVLPRIPVIVSQDRSKLRIQRQRRSRSRIQNRMNNPLPTDYRILDLHAVVSHHSITMPSPSADQSQSQPKPNPNLLSLFLKPIIMLLLTSLFFLFLGFAAFLLLNLFLLGGAFHRLRFRPSVTSAPASSIGLPPRDINNLPRFLVANGSATRPDSNCVVCLDAFHNAQWCRKLAACGHVFHRRCVDTWLLKVAACPTCRTPVGFNAGATVHDPPQRSDHLHTCGTDSNALTTLL

SEQ ID NO: 33135 - protein, 108 aa, Glycine max
  unsure (1)..(108): unsure at all Xaa locations
  Clone ID: TF_LIB3242-353-Q1-J1-B10.pep
SHMSSAAAYVEGGNQESCDDACSICLEEFDASDPLSVTTCEHEFHLQCILQWCQRSSYSPMCWHPISLKDPTKXEVDEGVQQRRSLTATPSRNAAVLHHPAFGDIEMQ

SEQ ID NO: 33136 - protein, 453 aa, Glycine max
  Clone ID: TF_700842658_FLI.pep
MAAQKRSFPDAPNDNNRHAKHHHEEAKTEEEEEEEEEEAQQQQQHDEEEEEEDNNYKSDDSPPEDKSEYVFVELLEIRKEVQCPICLGIIKKTRTVMECLHRVCRECIDKSMRLGNNECPACRTHCASRRSLRDDPNYDALIAALYPNIEKYEQEELEFREEDKNRNKQASIAKVVQRQSEALVKRRRDTPGSFVTRSQRNQRNVLSRRQNQGMDNQGSEDNEEENDNNEKDSSSTDERCTELRQRRRKRRTRGRPSQPSSSTASPDGGCIESDMDIRISSRLVSKPQKLTWGRGGFRSHTRHGSGNGSNSKSSRSSRLAKLVDYLHSLNENTDELDVHLILLSLDKQITPSLQQPHLCCRPTLSVKHLCEYVAHQTPLLLEEVEILAVKGCCSTVCDKSFDETSSSDELTTLVIDPSKDELETLQGHESLAGIKSKCISKREHLILAYRRKE

SEQ ID NO: 33137 - protein, 184 aa, Glycine max
  Clone ID: TF_GmC127138_1.pep
MSSSSIPSSPDHFPHLGLGYSIAIALAFLFLLSTLLLSSYLCCRHNRRRLRHTTAAATSDGGIVLPRVIFVAEDEDEDGSVAVGFDQSVINSYPRFQYDRDNARNNNIINTTCSICLCEYKDSEMLRMMPECRHYFHLCCLDSWLKLNGSCPVCRNSPLPTPLSTPLQEVVPLSQYAADRRRNR

SEQ ID NO: 33138 - protein, 384 aa, Glycine max
  unsure (1)..(384): unsure at all Xaa locations
  Clone ID: TF_GmC1149_1.pep
MPVTNTTTPTVAEHIKWRRPRNQFNHHQHPISETDPNPQIPSIIQSTRCKSTISSLLLSTFSNNTSSNNDTPTTFNATAHSKKKSNFSASTFRGLGCTAGASQQVSVPAVIRSSAVQSKTPQNWKAKKTSKKKHKRSSSSSKHKTFHPLGXGSTNSSVRVFSSCFVRPSQQFLLHHPSIPLLIXEENKHFVSSARGKIDVDKITHRERSSYVGRRTETFTFLDSTDPDIFTPRSASDSYGTATYYRHVRDPSSDGFAEIMMLQGSLLMGGQLNSHDHFKDWRLDVDNMSYEQLLELGERIGHVNTGLKEDEMGRNIRKTRLQFWDDTSKHQVDKECSICQEEYEAGNELGRLNCEHIYHFQCIKQWAAQKNFCPVCKQQVAARH

SEQ ID NO: 33139 - protein, 206 aa, Glycine max
  Clone ID: TF_GmC1428_1.pep
MGVPQPPPPSQHLYPQEIQLKLYQAFIFSIPILFSIILVLLFYLFYLKRRASSLSSPPLHILPSTTNSQTTYPYPSQPCRLDLTVQFLDKLPRILFHEDLRTGDSVCCVCLGEFELKEELLQIPYCKHVFHISCISNWLQSNSTCPLCRCSIIPSTKFLNPAPPIISDPTRQGGVSGSSSHILSLPHQQEEVGASTNTTIFQGNDV

SEQ ID NO: 33140 - protein, 305 aa, Glycine max
  Clone ID: TF_GmC552_4.pep
MGEVAVMHSEPLQFDCNDMKHITEKDVYNLLSNEEHILGEESSQSSNDKKINDLRERGYMKCQHYRRRCRIRAPCCDEIFDCRHCHNEAKNNINIDQKHRHDIPRHQVKQVICSLCETEQEVQQNCINCGVCMGKYFCGTCKLFDDDVSKQQYHCSGCGICRTGGCENFFHCHKGGWCYSTQLKNSHPCVEGAMHHDCPVCFEYLFESRNDVTVMPCGHTIHKSCLNEMREHFQYACPLCSKSVCDMSKVWEKFDLEIAATRMPEQYQNKMVWILCNDCGKTSHVQFHFVAQKCPNCKSYNTRQT

SEQ ID NO: 33141 - protein, 349 aa, Glycine max
  Clone ID: TF_GmC481_1.pep
AKESSLPSSLPPPPPSGTRISPAVLFIIVVLAVLFFISGLLHLLVRFLIKHPSSASAQSNNRHQELSTSDALQRQLQQLFHLHDSGLDQAFIDALPVFQYKEIVGLKEPFDCAVCLCEFSEKDKLRLLPMCSHAFHISCIDTWLLSNSTCPLCRGTLLTQGFSVENPIFDFDDLMEDEMCPWNGENGFNTRQKTVVVEESVEKEKGVFPVRLGKFKKLSSVEGGGESEVGETSSSNLDARRCYSMGSYQYVVGNSDLRVALNHDEIGKGQVTRLNKGMELDDGKVSVEEGDVEGKKISSVSKGDSFSVSKIWLWPKKGKLPTSLDGQIGMPMPSFLNTDFPRMRDTEGA

SEQ ID NO: 33142 - protein, 216 aa, Glycine max
  Clone ID: TF_GmC23999_4.pep
YLCSTFRGCSFIHALALFKSIFFLCSIYLLLFFPLTPITMPSPSDHHRPQPKPNPNLLSLFLKPIIMLLLTSLFFLFLGFAAFLLLNLFLLGGAFHRLRFRPSVTTAPTSSNGLPPREINKLPRFRVANGSETRPDSNCVVCLDAFHNAQWCRKLAACGHVFHRTCVDTWLLKVAACPTCRTPVRFNAGTTVHDPPQRFDQFHTCGTDCTALTTLL

SEQ ID NO: 33143 - protein, 387 aa, Glycine max
  Clone ID: TF_GmC24755_1.pep
MATTRSSSEDIVDSTPLLANSAGSSDDLTSGRRFARRQRLRQAAQFLRQASGRRMMREPSMLVREAAAEQLEERQSDWAYSKPVVVLDIVWNLAFVVVAGTVLVLSASEAPGMPLRLWIVGYAMQCVLHMVFVCVEYRRRRRQQPAAASSVQDRVGSSSGNLSVSSREGSASASASAQNVLLGQLDDESTSVAKHLESANTMFSFVWWIIGFYWVSAGGQALAQDSPQLYWLCIIFLGFDVFFVVFCVALACIIGIAVCCCLPCIIALLYAVTDQEGASKEDIEQLSKFKFRRIESNEKLTGTIQGPVGGIMTECQADSPIEHALAEEDAECCICLSSYDDGVELRELPCGHHFHCVCVDKWLYINATCPLCKYNILKSSNLSQEEV

SEQ ID NO: 33144 - protein, 356 aa, Glycine max
  Clone ID: TF_GmC56808_1.pep
THSFVGTRVLNFPDEGDEFDSDTDIDPMHAGLSQWISTDEDNEEEEEEEEEEEEEEDREWELADVYEAEATSHLQIFFTSSPSESRDHINSTESGGMFSQIIRETWHAFEDVDLPHGANFGDYLDARRFEDLLEHLAENDSSRRGAPPAAVSFVNNLPRVVIGKEHENHGELVCAICKDVLAPRTEVNQLPCSHLYHINCILPWLSARNSCPLCRYELPTDDKDYEEGKQNIDSRNVIHERQRIDVTDDSYSDVSDGDEVNGSGQGGIRQRLLSSGSTVDSSATRSGRGRWFFLAAAPIVSLVGIVLVLWLGNNSQNEGSRHLGSHYLSGQNQHAVHAYSSPNQREGRSRGWWCPF

SEQ ID NO: 33145 - protein, 206 aa, Glycine max
  Clone ID: TF_GmC37201_1.pep
MSWRSVRGSRKRKMDFELDLNRDPPLVREEEEEEEEGGPSRHQQHHHHQQEPQTPIVDVDAIDDDVVESSPRSFAQAKSNADERRRVRRRTTIVDLDSEDGTGGVPQNQTIINGDLYVNLANNSSSASENAKKTPEPPKEPEAPKEPFFNCPICMSPLVEEMSTRCGHIFCKNCIRAAISAQAKCPTCRKKVTKNSLIRVFLPATS

SEQ ID NO: 33146 - protein, 300 aa, Glycine max
  Clone ID: TF_GmC1077_1.pep
LARSKSDVQSCAHQEMATAEAEIADMRQKLEDSKRQMCDLSDVLKSKNKQNENYMSEIESIGQAYDDMQTQNQHLLQQITERDDYNIKLVLEGVRARQKQDSLLMEKRVIEHEIQQANISLNVYDVKATRIEDQLKFCLDQLQKLAEDKLQSSVTLENTQRRLSNVRRQSQQVTDMVVEMQSKIGSNRVTRMELQVELEKERFAKKRVEENLEVARRKFTCLKEQNEGFLVTEKLQQELEEYREIIKCSICQDRAKEVVITKCYHLFCYSCIQKVAGSRHRKCPQCGTSFGANDVKSVYL

SEQ ID NO: 33147 - protein, 132 aa, Glycine max
  Clone ID: TF_GmC99_1.pep
MTLKGLVSLVINLIGLAEGTRNNDAPPLPCYMLSSHIQNNKQQSSESASASNFNEDSWCCVCLSRLKAKDEIRVLPCSHKFHKICVNKWLKGRHKTCPLCRFSMGAEEKSHRAEMFTEEMLIWFSSFHVAGM

SEQ ID NO: 33148 - protein, 400 aa, Glycine max
  Clone ID: TF_GmC127181_1.pep
AILLCAFCIFLSNLQSTRGSKQVNCNTLRCGNIDIQFPFGLRGSNQDRGCRYYPVQSFQLSCLHGGTQTILTLPGFGNLTVKSIDYESQSIRVNDPDGCLPKRFLQKWSLSVSDSPFVLNPMIYGTIPFNLTFLRCPSNVTDSSQYPLVPISCLSNNSNYSVIASWSQPIMSSPSLSQQCQVMSRALARLPLLDMPMWPFWPDLNTDLDLVWTEPDCRNCALSGQVCGFSKEKTKTPQVRCFARDSTKGLSRSAKYGLAIGVGIPGLLCLIGISCCICGKLTNRRRSADLPVTISLEPVPFVMGLDGATIDKYPKTLIGESGRLLKPNDNTCAICLSEYQPKETLRSIPECNHYFHADCIDEWLRLNATCPLCRNSPEASSTASFFSLSPTSSSSSRSPQ

SEQ ID NO: 33149 - protein, 245 aa, Glycine max
  Clone ID: TF_GmC4200_1.pep
MEMESKDYAFSGKIMLIAIVVLFIVIIIMLCLHVYVRRRLVNARRRPQLRRSNRPQFVFYMDPAARIALTRRGLHPSVISTLPMFTFSATNNPTECAVCLSEFENGETGRVLPKCNHSFHTECIDMWFQSHATCPLCREPVEAIPERETRSEVAVIVCDTEPVREEVNRSGPVGASSSAAATSLHIENLGCEDGCESESSFRSPVSRILSFKRILSREKKGSVVGVCSSMTELDVEQRGECDSVS

SEQ ID NO: 33150 - protein, 882 aa, Glycine max
  unsure (1)..(882): unsure at all Xaa locations
  Clone ID: TF_GmC25542_1.pep
MHSSCFQAYTCSHYTCPICSKSLGDMAVYFSMLDALLAAEELPEEYRELYQDIDHIMETIQRHFHNEEVQVLPLARKHFSFRRQCELLYQSLCMMPLKLIERVLPWLVGSLTEDQAKTLQGNMQLVAPETDPAPFKLFCEGFCKARNKGLCVSSSALDCCPVQRLSAIEENFVGPSCAFAFAHLIHIARDXLIKXGNNRSVKRNISELHKNEDLPETSEAEDIQKQCCSARSCCVPGLGVSSNNLGLSSLSTAKSLRSLSFCSSAPSLNSSLFIWETESSSCNVGSTQRPIDTIFKFHKAIRKDLEYLDVESGKLSDGDETILRQFNGRFRLLWGLYRAHSNAEDDIVFPALESKEALHNVSHSYMLDHKQEEQLFEDISCVLSEFSVLHEALQMTHMSDNLSESNFGTSDANTSDVIKKYNELATKLQGMCKSIRVTLDQHLFREECELWPLFGRHFTVEEQDKIVGRIIGTTGAEVLQSMLPWVTSALTQDEQNKMMDIWKQATKNTMFNEWLSECWKESRVSTAQTETSARSTSRRGAEYQESLDHNDQMFKPGWKDIFRMNQNELESEIRKVYRDSTLDPRRKAYLVQNLLTSRWIAAQQKSPKALSEGSSNSVEIEGLSPSFQDPEEHVFGCEHYKRNCKLRAACCGKLFTCRFCHDNVSDHSMDRKATSEMMCMRCLNIQPIGPLCITPSCNGFSMAKYYCNICKFFDDERNVYHCPFCNLCRVGQGLGIDYFHCMKCNCCLGIKSSSHKCLEKGLEMNCPICCDDLFTSSATVRALPCGHYMHSACFQAYTCSHYTCPICSKSLGDMAVYFGMLDALLAAEELPEEYKDRCQDILCHDCDRKGTSRFHWLYHKCGFCGSYNTRVIKCETSNSSCS

SEQ ID NO: 33151 - protein, 175 aa, Glycine max
  Clone ID: TF_GmC5791_1.pep
FSPAQREAVEALIQELPSFRLTAVPTNCSECLICLEEFHVGNQVRGLPCAHNFHVECIDEWLRLNVNCPRCRCSVFPNLDLSALSNIRSESEQSSATAVTSRDMTGQTSSQSYLLRLQGPLHPVCVDFAGPAGETDNALENAENGVVPVVTQNMSTRDQATSGEHMPVGLSSSQN

SEQ ID NO: 33152 - protein, 134 aa, Glycine max
  Clone ID: TF_GmC9444_1.pep
MGLSNFPSASEGVLPVLVINTVLSVAVLKNMFRSMLQVVLGGSAAANGSNIEHDESSSSSWERRVSITQYKSLCHSHDIGGTSMAMVECCVCLCRFEANQEVSELPCKHYFHRGCLDKWFDNKHTTCPLCRSID

SEQ ID NO: 33153 - protein, 671 aa, Glycine max
  unsure (1)..(671): unsure at all Xaa locations
  Clone ID: TF_GmC96_3.pep
MEELSAGPLVPAVVKPEPSKGASAAASGGTFPASTSEPDKDFLCPICMQIIKDPFLTACGHSFCYMCIITHLRNKSDCPCCGDYLTNTNLFPNLLLDKLILLKKTSARQISKTASPVEHFRQVLQKGSDVSIKELDTLLSLLAEKKRKMEQEEAERNMQILLDFLHCLRKQKVDELKEVQTDLHFIKEDINAVEKHRMELYRARDRYSVKLQMLDGSGGRKSWHSSMDKNSSGLGCEKTTEGGGLSSGSHTKKNDGKSHISSHGHGIQRRNVITGSDSQYINQSGLALVRKKRVHTQFNDLQECYLQKRRHAADRSHSQQERDISLISREGYTAGLEDFQSDIISFTCNSRLRXLSELRHGDIFHLAKIISSIVYFRDDDLFASAXVSRRIKVVHYSAFMIEPREAHYSDLEKSTHSKRSCFCRNKFGKNQIACNCYDRFVSDXDVIIQKSLIDYKEHXKGVWILVSSXTDPSMLVTGRIDSNVKICFTNQEASVLNIDMKANICCVKYNPGSGNYIAVGSADHHIHYYDLRNISRPVHVFSGHRKAVSYVKFLSNDELASASTDSTLRLWDVKENLPVRTFKGHANEKNFVGLTVSSEYIACGSETNEVFVYHKEISRPLTSHRFGSPDMDDAEDEAGSYFISAVCWKSDRPTILTANSQGTIKVLVLAA

SEQ ID NO: 33154 - protein, 81 aa, Glycine max
  Clone ID: TF_15200544.pep
MKSQKRVLGCCGLVDCAVCLENFKVGDVCRLLPNCSHSFHVQCIDSWILQTPVCPICRTWVHSPVVREQSVVSESLEIVTE

SEQ ID NO: 33155 - protein, 171 aa, Glycine max
  Clone ID: TF_GmC7141_1.pep
LSPRPNLLGTPLPTPTAALIVFLLESDKGSTATETFKGQKMLDSVLLALFLPCLGMSGVFIVYMCLLWYATTRHHQQPPIDGQPVKPVADKGLSALELEKLPKITGKELVLGTECAVCLDEIESEQPARVVPGCNHGFHVQCADTWLSKHPICPVCRTKLDPQIFTSQSPC

SEQ ID NO: 33156 - protein, 185 aa, Glycine max
  Clone ID: TF_GmC23646_1.pep
MLQRRLLETELSMPPSYGGSGGNNTRDTFISDANFDTNMVIILAALLCALICALGLNSIARCALRCGRRFGDETAEQAAARLAGTGLKRRELSRIPVAVYGAAGGENTIPATECPICLGEFEKGDKVRMLPKCNHGFHVRCIDTWLLSHSSCPNCRHSLLEKTSAAPESGSGRRSEVVVVVEQAS

SEQ ID NO: 33157 - protein, 261 aa, Glycine max
  Clone ID: TF_GmC502_1.pep
MQGQRRTIGSFPAIVSMMQGPSSSGTDMSHQSSLNHVQNAVDFRLSDYRGSSGETACLRGTGHNVQSFNGWSTGESSSRLNLINQVNDEGLKSEHGLSSSYNAATEDGLRSEERQFEPNNVIFPVSSNTNLHGNQSRVHPSFLQAYSSTRIEMHDRHREMRLDVDNMSYEELLALEERIGDVSTGLSEDIIIKLMKQRIYVSVMTDSSIDLEPCCICQDEFADGENVGSLDCGHEFHSGCIKQWLMQKNLCPICKTTALAT

SEQ ID NO: 33158 - protein, 232 aa, Glycine max
  Clone ID: TF_GmC1189_1.pep
MDFALNPCPLRSSTFVNFVERVKQLGTLAVSAVIGNIFSAILTFCFALVGTLLGALTGALIGQETESGFIRGAAVGAISGAVFSIEVFESSLVLWQSDESGIGCVLYLIDVIASLLSGRLVRERIGPAMFSAVQSQMGAVETSFDEVQNIFDTGGSKGLSGDLVDKIPKIKITTDNNVDASGDRVSCSVCLQDFMLGETVRSLPHCHHMFHLPCIDKWLFRHGSCPLCRRDL

SEQ ID NO: 33159 - protein, 263 aa, Glycine max
  Clone ID: TF_GmC723_3.pep
MANFTSSSSSSCSPLPLSLTMSHISPPSSSAAFDDSSEDACSICLEPFSTHDPATITSCKHEYHLHCILEWLQRSKECPICWQLLILKDPASQELLNAVEAEKRLSSRTVYSHAFTDSRSPLHRLNNDQDDSDFDEQLTQHLVSAASRARYICRGERQRSPGAGPSEVLVFNSSMHASGMQSTLTTSPSSGVPSTSAFSSVGMVTTNTSSESDMPCKPRVIYSQPSPEKCRRLNTSEIFSFPESFKSKLSAASARCKESISKI

SEQ ID NO: 33160 - protein, 309 aa, Glycine max
  Clone ID: TF_GmC147_1.pep
MSNSRNTHWCYSCRRPVWLGRRDAVCPSCNEGFVHELNDMVHVNPFDLFEMDNNEERDQRLGLMETFSAFMRHQMADRGRSHDIRARTDSNPEHSASFAPLLIFGGHIPFRLSRHGGFEALFNGAPGIGLTQGNTGDYFIGPGLEELFEQLSANNRQGPLPASRSSIDAMPTIKIVQRHLRSDSHCPVCKDKFELGSKARQMPCNHLYHSDCIVPWLVQHNSCPVCRQELPPQGLSSSNGGANGRSRSARVSSSGRESHGRRNPFSFLWPFRSSHSSSNDEATGSSTPTPTIPENSHHHHAGYSGWPFE

SEQ ID NO: 33161 - protein, 335 aa, Glycine max
  Clone ID: TF_GmC761_1.pep
MENDTAAAVNNNTTATATAKAGSGGVKSNNHNLEEEHSNLNGEEQMAEQVEAEEEEDREADDGEGEETGSRQPSRTPFTNLSQVDADLALARTLQEQERAYMMLRMNNDGSDYGSWEGGSYLHDEGDDFDDLHDGTDVDEDEDDDDDEDDDDEEDEDEDAFDVHAHASAGEHDNPTIEFDPDVFSSDEAYARALQEAEEREMAARLLAFAGINDREEEDIEEHGANSQDAWEDVDPDELSYEELLALSEVVGTESRGLSTDTIACLPSVNYKTGSDQHGSHDSCVICRVDYEDGESLTVLSCKHLYHPECINNWLKINKVCPVCSTEVSASGSNL

SEQ ID NO: 33162 - protein, 128 aa, Glycine max
  Clone ID: TF_GmC133_2.pep
MLDSVLLALFLPCLGMSAVFIVYMCLLWYATNHHSDPALPAKPVSDTGISPSQLDKLPRITGKDLLMGNECAVCLDEIGTEQPVRVVPGCNHAFHLECADTWLSKHPLCPLCRAKLDPSLFSSSQNPC

SEQ ID NO: 33163 - protein, 81 aa, Glycine max
  Clone ID: TF_6227772.pep
EDEDCAVCLCIMGETEERIITLRCGHVFHRDCLNTWVGFNNATTCPLCRDSSGKRESGKLFRAEILLLDSCSIKRFSLENN

SEQ ID NO: 33164 - protein, 421 aa, Glycine max
  Clone ID: TF_GmC725_1.pep
MENNAFRDQIMEDNEHEEMPDSFVCCVCLDLLYKPIVLSCGHMCCFWCVYNSMSCLRESQCPVCRNQYYHFPTVCQLLHFLLLKIYTAAYKRRESQTLEEEKKSGFYSPQFDPDTCESQAKFGHSGIPSSSSILNLTSNSCNVGTSECLEQSGSTANEGDEGTIFSNREPDIIGTPAKGKKLPQEELSLQQKLSVADVTCTMCKQLLFHPVVLNCGHVYCQICVINIDDEMLRCKVCQSPHPRGLPKVCLELDHFLEEQFPEEYGQRRDAIELQQIKVKPDTPSSCSLDGGKKPENTDWWSDPDSKVHIGVGCDFCGMFPIIGDRYRCIDCKEKMGFDLCGDCYASRSKLPGRFNQQHTSEHKFKLVQPNIIHNIMLRLATAQLGEGSIDLESIGNIEVTSDGAALFGDGEDNHNDSEAAN

SEQ ID NO: 33165 - protein, 721 aa, Glycine max
  Clone ID: TF_GmC502_2.pep
MQGQRRTVGSFPAIVSMMQGPSSSGTDMNHQSSLNHVQNAVDFCLSDYRGSSGETACLRGTGHNVQSFSGWNTGESSSRLNLINQVNDEGLKSEHGLSSSYNAATENDPLRSEERQFEPNNVIFPVSSNTNLHGNQSRVHPSFLQASSSTRISQNISLDMGHVTNAADRGKGKEAGSSVNANNTSGIDREKTLFGSASCNHTGASSESSGYMAWGDSANSSSSLVNWGPSCKRKALEGSSRQLCSGGSSSTLVQSGNGCWPTDPVDLNASSDLTDSTPIEDIPVTSPPLFQNATNEERQEAPNGFPLISIAENVERPLRNFDRRMSHLQHQESVPLNLPSTGSARHHNHSSLHQAPGSHSINDSLELRLTAGGTSSANSGASLNQSPALRIHSFPWNRTANPRGARSSTSYNSGERAVREDFNLRMFPRDSTEHPMNVPASSGHEPIGWHTPSGNVNNSGGAPPPSWIGSSSNVHSPANRSWIFNHEVPAENMQSVSEFSPWSLFPSISSASGVHNAHSAPSSSGPPSFTQGSSSNQSYARTALVMERRGGDVLSGGPHSLRALTFDNEGRRRLISEIRQVLMAMRRGENLRAEDYMVFDHPFLYHGMAEMHDRHREMRLDVDNMSYEELLALEEHIGDVSTGLNEDVIIKLMKQRIYVRAIIMTDSYTDLEPCCICQEEFSDGENVGSLDCGHEFHSGCIKQWLMQKNLCPICKTTALAT

SEQ ID NO: 33166 - protein, 173 aa, Glycine max
  Clone ID: TF_GmC119902_1.pep
AVDHDTSSEALARQVEAVERLARELQEQLYHDDPFEGRGIDEDLAWDLQRAEALMRATIDSHSISQPRHLPRAIRQPRTRFPENPSRRRAMAQASFSAKISQRLYRSLAPEENIMPGVQVIYHLIHFGILVVNGAVVCYLSHLILSFKVKSKKVEIVIGMLLCSVQSFDTLDI

SEQ ID NO: 33167 - protein, 139 aa, Glycine max
  unsure (1)..(139): unsure at all Xaa locations
  Clone ID: TF_LIB4203-002-R1-K1-G10.pep
MSEELSAATSYTEDDFYCPVCQEVLKTPVRTAACQHVFCRKCFLTAMRESGIHCPLCRGSVTRRERACPERALDLENIMRRFSGSCRCCSKKIKFYRMRHHYKSCKKYQDEYGXFSSVIPNFKISQDSVRSSNRSETSA

SEQ ID NO: 33168 - protein, 172 aa, Glycine max
  Clone ID: TF_GmC1667_1.pep
MGFYAEDPLSGLTIGQAIYEVALMIAVLRWVLCLIFRVINDRRTTQSDETPTPEPCSQMTRDNDSILLLTTFGEIKERLPETEETCAVCLSQLSVEDEVRELMNCYHVFHRECIDRWLEHEHENHSATCPICRAPLLSSSCHHSSATCLPPPQPSWAVERLLYLFGDDLLPC

SEQ ID NO: 33169 - protein, 421 aa, Glycine max
  Clone ID: TF_GmC251_1.pep
SHRAIEQLPGSNTFEVAGGSSNNFGRSSSFMNDARGPHKRKIPKGIRGNSQDFNASSSSSSTAPPNARHANDVAIMDNTQFHIRSLVEVGPHGSEWSRPNESIMVHDHNHLIHGNYLGQHFPPIAPPWLFQQLNSNNNDGHATPWNQSLPMPCVQAPAINGSSLESVSMGLQRYHDPVGNRNGLRFPYHVPVNQQHHSYHHSTLPMQGVRDHSLNFFPTVTTNSFRVPTNPLRNVAIPTQASFEMGPRHVGPAPSSSLRIYRPHRGVVPETTLRHRSLPPMGFLRVNDVALIDEVGNLVDNHRDMRLDIEDMSYEDLIALGERIGNVNTGLSEETITTQLKTKTYLTGATSINMEEEVCDDQGTFSCIICQDEFKNQEKIGVLQCEHEYHADCLRTWLVVKNVCPICKSEALKSTSVSPPT

SEQ ID NO: 33170 - protein, 263 aa, Glycine max
  Clone ID: TF_GM651B23rgnG1.C1.o42.ma.pep
MALSVICSSKGNVLSESNILVVSCVVLNGLASFVIVEGLHDGSKARDVNLGGWLVIEGWMIKPSLFGGTANGDMLVQFKSGTLQKYVSAENGGEMNNLTICVFIIVIASTACVIMFLITLSKILSYYYARRYNVSRSNPPILFDIRGDFPFSDDEEQEQAIRHPIWFIPTEGLQQSIIDSITVCKYRKDEGLAKETLTECLVCLGEFQQEESLRVLPKCNHAFHISCIDTWLRSHKSCPLCRAPIVLDAASLCDINQDIEESI

SEQ ID NO: 33171 - protein, 349 aa, Glycine max
  Clone ID: TF_GmC1719_1.pep
MGNIGSSGSNSRWRHGGGGGSGRRIHPPPPPVMSPPEVTANRFVYPPAATPYHNYPGYYPPPTTMPAPLPAPYDHHHRPAVDPMWVRYPPAAPPAPAPYVEHQKAVTIKNDVNIKKETLRIEPDDENPGCFLVSFTFDATVSGSITILFFAKEGEGCTLTPMKENVLPPVTVNFQQGLGQKFKQPAGTGIDFSTFEESELLKVGDMDVYPVAIKADASSSDHDESKSNETPSSGSSNSQITQAVFEKEKGEFQVKVVKQILWVNGMRYELQEIYGIGNSVESDVDGNDPGKECVICLSEPRDTTVLPCRHMCMCSGCAKVLRFQTNRCPICRQPVERLLEIKVGPEPEE

SEQ ID NO: 33172 - protein, 561 aa, Glycine max
  unsure (1)..(561): unsure at all Xaa locations
  Clone ID: TF_GmC7728_1.pep
VGPPDRIPVASVAGSAAGFRCHVRPPPSLIKSSGPLNEHVAPTVGSGPFLLPSGTANGFLGEETDGRPGCSLDTRRVSCKRKAVERNVGQSSDGGSSSYSQHTDGSTWNTLPTQAYGGISFNRSAPTDQVNARLGLSTGDGSSESIPVSNVARSSGSFHRNFRPRTSPSSQQISVPSTAISSGNVIRSSGVSSPSPILQRFHPVDXSFDLRAVPPVDTMVPQSQPLVIHVPALPRNAQSFRWSGGSSSTNNHSSNSVMCADRNNLPNEEASSRSMPRNIIEYPMFVPATNLRNVVRNPARTSNNANLSIPGNVGSSSRTGSNPAVNPPPASAWVSRPNPQQYPRRLSEYVRRSLFSPGLEAAGSSSNSYTPFRGPPTSSESRGLSSGVNPFERQGDSEFGIPYSLQSLVVAGEGSSRLVSELRNVLGLMRRGGNLRFEDVMILDPSVFSGIADIHDRHRDMRLDVDNMSYEELLALEERIGNVSTGLSEEIVSKLLKKKKYSAEPDSQHEAEPCCVCQEEYKDGDDLGSLDCGHDYHRDCIKQWLMHKNLCPICKTTGLAT

SEQ ID NO: 33173 - protein, 231 aa, Glycine max
  Clone ID: TF_GmC1025_1.pep
MASETEVPDIISSVFERFQQNRDMSLFLPFLFGFSDATPGRNSDDPDHETAPTEAPQRQRIILVNPLTQGMVVIDGGSSLEALFREFTNGKGGRPPASKESIEALPSVEIGEGNEDSECVVCLEEFGVGGVAKEMPCKHRFHGNCIEKWLGMHGSCPVCRYEMPVEEIDWGKKREEEGGERRRSDGGEVWVSFSFNRSSRRNQDHDQADSGDSNDDDGSSSSHGDGAAEES

SEQ ID NO: 33174 - protein, 83 aa, Glycine max
  Clone ID: TF_LIB3029-001-Q1-B1-A5.pep
RIGNVSTGLSEETLSKLLKQRKHSVEKGSETDAESCCVCQDDYGDGTDIGTLDCGHDFHSSCIKQWLMQKNLCPICKTTGLAT

SEQ ID NO: 33175 - protein, 367 aa, Glycine max
  Clone ID: TF_GmC92_1.pep
MDLVSRRYLIYVSQHGSQPQALSPITSPGSSIFHPHQHASSTSFPIIAIAIIGIMATAFLLVSYYIFVIKCCLNWHRIDVLRRFSPSRRREDPPPTYSPATDTRGLDEALIRLIPVTQYKAQQGDDRDFGERRFCECAVCLNEFQEDEKLRVIPNCSHVFHIDCIDVWLQSNANCPLCRTSISLTSRFHIDQLLTLRPSSSSYPHDQTPPRENLIGGDEDFVVIELGSDHDRSQNLQERGNALELPTCPISPSSPRKLLEHRNVQKKKAMKLQKVTSMGDECIDIRAKDDQFFSVQPIRRSFSMDSSGDRRFYLAVQEALRNQNWQVNEVNSIEGCSGIGSRAKRSFFSFGHGSRSRSSVQPVSLDP

SEQ ID NO: 33176 - protein, 106 aa, Glycine max
  Clone ID: TF_uC-gmroLIB3258040h12a1.pep
DIDIEREDECGICMDMNSKIVLPNCNHAMCLKCYREWRTISQSCPFCRDSLKRVNSGDLWVFTDRRDVVDMATVTRENLRRLFMYIDKLPLIVPDSLFDTYDSHIR

SEQ ID NO: 33177 - protein, 234 aa, Glycine max
  Clone ID: TF_GmC127065_1.pep
MSSGATYWCYTCRQPICLARRDHICPYCDEGFLQELDELQGGMEQRGSEPRMGGRYINFGVRRPGSTPLPESWTRGVFIFPNQEVAADREGFFEQHITNDPLGASQSSIDAMPTIKITHEHLYSNPKCSVCIERFEVGSEARKMPCDHIYHSDCIVPWLVHHNSCPVCRGKLPPEGHVSSRGSQIWRGRNVNGNSENDIYRGRENRQFNDGWRNLLSFLNFCGQSFLLIQILNS

SEQ ID NO: 33178 - protein, 195 aa, Glycine max
  Clone ID: TF_GmC1797_1.pep
MMPPSQPPHWAPSPTPILSKSFLPPTSNSPAVDFTPPLIAMVVVVAAAFLVVTYSRLIARHLRPPVHRLLRRFRRRRFLPSSVGDLESLPYDSPFDGPHVFSPYGLDETVIKTIPFSLYTAKYDARFDESRYDCAVCLLEFEDEDYVRTLPVCSHTFHVDCIDAWLRSHANCPLCRAGVLCTDSPFTPMMAALEP

SEQ ID NO: 33179 - protein, 156 aa, Glycine max
  Clone ID: TF_GmC520291_1.pep
MTSVCEFLYQLYAKTIVLLTYMLIELILIIQYLKSDTRPISTAQYLNFIEEKNPTIQFTRRLKAENIDCRVCLSEFQEGEKVRNLNCRHTFHKDCLDQWLQQYCATCPLCRNKVLPDDVVANHNLLQNQAEYDGNDDQLIFLLSALRGGSTLHRYL

SEQ ID NO: 33180 - protein, 462 aa, Glycine max
  Clone ID: TF_GmC7706_1.pep
MDQMSQQRHGYFHSESIHFRGSNISPPNVCTLVTASGHGTNLDSHYLLDAYDNGMMYGMTQYNGVQHQHNLDMGVPAAANIYYSSMNPSSGTAASLNAEVRRGNYQYFNASASSTVAPPNARHTENGIPSLPHCTSWSRSGESMMVRDPNRITQGNYLSQHFQPAAPPPWLDQQLNSNNNDGHALPWHQSLPMPYVQAPSANGSSLEKCKNGGHRFPHPPLVNPHYHSFHHQTQPVQEMRGHSINFHPPPPVTAPSYRVPTNASRSSSIFIQDAIEMGARHVGAAPLAGSHIYRPHRGSTHETTLRHRNLPPVTFLQVDQVSLERFQPSFFLQVDDVTLLVDHHNDMRLDIEDMSYEELLALGERIGKVNTGLSEEMITSQMKTKSYLLLATNAINLEEAASEEQETDSCIICQDEYKNQEKIGILQCGHEYHADCLKKWLLVKNVCPVCKSEALTPGEKCV

SEQ ID NO: 33181 - protein, 133 aa, Glycine max
  Clone ID: TF_LIB4391-049-R1-K1-C7.pep
MENNAFRDRILEDNEHEEIPDSFVCCVCLDLLYKPIVLSCGHICCFWCVYNSMNCLRESQCPVCRNQYYHFPTVCQLLHFLLLKIYTAAYKRRENQTLEEEKQSGFYSPQFDPDTCESQAKFGHSGIPSSSSI

SEQ ID NO: 33182 - protein, 205 aa, Glycine max
  Clone ID: TF_GmC243_1.pep
MSSRAGKGPAVRSYRRRKTALDLDLNRVPAGENREQEGPSTQSVPREVQVEQQQQATQPPMIDVEAIDDDVVECTPRAFAEAKNNSRRVRRRTIVDVDLEDQTRRNKRRRELPNLIINCDKYINLEGGSSSMEQSFKKPPEPPKELVFNCPICMGPMVHEMSTRCGHIFCKDCIKAAISAQGKCPTCRKKVVAKDLIRVYLPSTS

SEQ ID NO: 33183 - protein, 342 aa, Glycine max
  Clone ID: TF_GmC285_1.pep
MADVTTYLRHHRDPDPDPDDDDQTLIPFPYWDLDFDFDPEFPTNTFSFTDRENQINFVMDLFHQRVEQSQLTDPLSNDAVFGVIDGIDLGFPAADDFFIGRRFSVGSDESDGGHSHSHAGIDDGVLGFCAHSDEDYNENDDVASIPLCWDALQLEDNNNNYDDFEWEEVIDERDVLSMLDDTVSVNLGIEEETAAAAAEEEEAESEVSILEWQVLLNSNNLEGPNSEPYFGDNEDFVYTADYEMMLGQFNDDAFNGKPPASASVVRNLPSVVVTEADVVCAVCKDEFGVGEGVKVLPCSHRYHEDCIVPWLGIRNTCPVCRYEFPTDDADYERRKAQRSVVM

SEQ ID NO: 33184 - protein, 232 aa, Glycine max
  Clone ID: TF_GmC6834_1.pep
MAFQHYISRDLKTIPNAATETENSNGCFDCNICLDFAHEPVVTLCGHLYCWPCIYKWLHVQSDSLAPDEHPQCPVCKADISNSTMVPLYGRGHAATAEGKTSSCDVFIPPRPSASCVQALLATSSQRGQHLPYRNPYQGHYFSSHPYQEEDDATSQMLNLGSHHHPVTGMFGEMVYARVFGNPENLYAYPNSYQLMGSATPRLRRQEMQAHKSLNRISIFLFCCFLLCLVVF

SEQ ID NO: 33185 - protein, 168 aa, Glycine max
  Clone ID: TF_GmC12407_1.pep
MAETPSPSESPTASFGPIISNGQVGGFDWIVLVAAILCAFVCALGLNTMLQCVFQCACRVLTEPRQWIASRRLNSGLKKKEMVALPTSTYTTTHSAAASSSSSPNSSSCVICLAEFSDGDPIRFLPKCNHYFHVVCIDKWLLSHSSCPTCRHLLKSNDSLHSLHIVIA

SEQ ID NO: 33186 - protein, 55 aa, Glycine max
  Clone ID: TF_LIB4198-005-Q1-N1-F12.pep
GVVEYNCCVCMVRHKGAAFIPCGHTFCRMCSREIWVSRGNCPLCTNLILEILDIF

SEQ ID NO: 33187 - protein, 330 aa, Glycine max
  Clone ID: TF_GmC37342_1.pep
MEDSDQPAKSAENQQTEQVCSFFRKPVNKKNLRKRTIEIEDNEEDSNNETSLLHIQKKTLKADNKLYFSTGSSKSSASAEPSEESGKTVFQFESSKEIQVQHDSKATAILETETEFSKDARAIRERALKQAEESLKGKSASSEDKKLYKGMNSYKDYKAGFRREQTIASEKAGGSHGPLRASAHIRVSARFDYQPDICKDYKETGYCGYGDSCKFMHDRGDYKSGWQMEKEWEEAEKARKMRLAAGEDADEEEGANLTDEDDEDSLPFACFICRNSFVDPVVTKCKHYFCEHCALKHHSKNKKCFVCNQPTLGIFNVAHEIRRKMAEDKS

SEQ ID NO: 33188 - protein, 136 aa, Glycine max
  Clone ID: TF_GmC1096_1.pep
MLSKYLAPIYTHLKWVLDFVLYYPFYMLYDSHPPINLGTELSTFHYEFSSGSEEHVDCAVCLSKFGEGDEVIRVMRCEHVFHKGCLDRWVGFENATCPLCRGSLTPKRPITNSGAEVVLFQFCSVQKCNDETWWLR

SEQ ID NO: 33189 - protein, 202 aa, Glycine max
  Clone ID: TF_GmC257111_1.pep
MEGEEGKQSSQKNPYVELEEVDFDFILAMSMQEQEREFTMLSTIESESDEYLSDSSIDNDDDGDPDFIASQEFETDLRFLEGEGSDDDDEDMEMEEDEIDPDELSYEELMELEEFIGEETRGLSANEISLCLYPYTCQCAESKSGIDRCVICQVEYEEGEALVALQCEHPYHSDCIRKWLQIKKVCPICGNEVSTPNLASNP

SEQ ID NO: 33190 - protein, 58 aa, Glycine max
  Clone ID: TF_GmC266_2.pep
KVKKLIIKDPECCICLAKYKDKEEVRQLPCSHMFHLKCVDQWLKITSCCPLCKQGLER

SEQ ID NO: 33191 - protein, 213 aa, Glycine max
  unsure (1)..(213): unsure at all Xaa locations
  Clone ID: TF_LIB4167-008-Q1-K1-E9.pep
MVDSGSDFAGIICSICYEPLNPINEDLQSVSICGHVFHELCLQQWFEYSSKGKKHTCPICKQGCRASDACRLYFQSVGDANNSVKPSKCFELEEDAGVLRREVKRLEVKVSGLNSQVEGQTKELEGLNEELCTCKEQAKIETAXKNEALNQKASIQFQLQMKSEELEKSTXECFRLKERNMALAKELAXIKIVSDLDIDERRVXKLATLGNGA

SEQ ID NO: 33192 - protein, 57 aa, Glycine max
  Clone ID: TF_uC-gmflLIB3275009b02a1.pep
ICYVLICLQECCICLAKYKDKEEVRQLPCSHMFHLKCVDQWLKITSCCPLCKQGLER

SEQ ID NO: 33193 - protein, 161 aa, Glycine max
  Clone ID: TF_GmC80819_1.pep
MGFPVGYSELLFPKLLLHILSLLGLLRKLICSLLRFMGLHDFLEPDIAWAETQTRVPEEFESVSATLIREILPVVKFRELVDPPETCAVCLSEFEENDEIRRLANCRHIFHRGCLDRWMGYDQRTCPLCRTAFIPDEMQGAFIERLWAASGIAEYPHVAPF

SEQ ID NO: 33194 - protein, 156 aa, Glycine max
  Clone ID: TF_LIB5118-038-A1-PF1-E2.pep
MGFPVGYSELLFPKLLLHILSLLGLLRKLICSLLRFMGLHDFLEPDIAWAETQTRVPEEFESVSATLIREILPVVKFRELVDPPETCAVCLSEFEENDEIRRLANCRHIFHRGCLDRWMGYDQRTCPLCRTAFIPDEMQGAFIQRLWAASGIADPL

SEQ ID NO: 33195 - protein, 234 aa, Glycine max
  Clone ID: TF_GmC1513_1.pep
MGSMGNSNPNLNPNPNPNPWTPKDCSEGICSIYCPQWCYKVYSPPPPILLGDGDDDPSGFEFSPLIVAVIGILASTFILVTYYTIISRFCRRRNNTNDSTEDDGNSELARVSSSANSGLDEALIKSITVCKYNKRGGLVEGHDCSVCLIEFQENENLRLLPKCNHAFHLPCIDTWLKSHATCPLCRSSVTACPNPNPNSSMEPPPRVIVNALGHQLRSNHVVVVESSEEQQKDG

SEQ ID NO: 33196 - protein, 236 aa, Glycine max
  Clone ID: TF_GmC154097_1.pep
MPITNNTSHTMTNNRFSGMIETVAMCKQLCFGGSALGLFTKIIKKVLFALFTCILALGGSIVGTIAGGIKGQTTEAGFLDGAGKGAITGAIAALELINFDAFDEPISKVALLSSLLNGKIFMEWICPAVARLYQLHVTVNTLETIYQEVSDIYDIRGVRGIPHNVILKLPFQPFNSRKMLKSYNMSCCSICFQDFEDGELVRILPKCDHLFHLQCIDKWLVQQGSCPMCRTYVPES

SEQ ID NO: 33197 - protein, 247 aa, Glycine max
  Clone ID: TF_GmC2571_2.pep
MYIASMGRSFKDSLKLLEADIHHANTLASDFPREYDGACLQMRMSYSPAAHLFLFLVQWTDCNLAGALGLLRILIYKVYADGTTTMSTHERKASIREFYAIIYPSLVQLQKSVADTEDKKQKAVCMERYRKRDDEEHRQPSDIDIEREEECGICMEMNSKIVLPDCNHVMCLTCYHEWRTRSQSCPFCRNSLKRVNSGDLWVFTDNRDVVDMATATRENLRRLFMYIDKLPLVIPDFLFDTYDSHLR

SEQ ID NO: 33198 - protein, 284 aa, Glycine max
  Clone ID: TF_GmC907_1.pep
MAEDGNNNDVPLHKFKDSNPNPEEFDAKGYSLSGKIMLSAIILLFFVVVLMLCLHIYARWYLRRARRRQLRRQRELRRTQLVFYNDDATPAAVSRGLDAAILATLPVFTFDPEKTGPECAVCLSEFEPGETGRVLPKCNHSFHIECIDMWFHSHDTCPLCRAPVERAPEPEVVVITVPDPVSETGSGENENRTGSSSSSSSVGLSKPKPSLVGVTIEVPPRDENFQNELQPSCDSSSSFRSPMSRMLSFTRMLGREKKGNVSPSSCGGGDCSSAAERGEREETQ

SEQ ID NO: 33199 - protein, 240 aa, Glycine max
  unsure (1)..(240): unsure at all Xaa locations
  Clone ID: TF_GmC759_2.pep
MALDHFEESVHQKGNWKSSSEIIADSGRNASGSFDCNICLECVQDPVVTLCGHLYCWPCIYKWLHFQSTSLDNEEQQKPQCPVCKSEVSQSSLVPLYGRGQTTIPSKGKPHQVGTVIPQRPHGPRTHXLXSVSQPISQSYHPYSNPYHPQQHFNSIPSGYTSPMIRTTGSIDNTFGIFGEMIYARVFGNHVSNIHTYANSYNLSGTSNPRMRRHLMQVDKSLSRISCFLLCCLVLCLLLF

SEQ ID NO: 33200 - protein, 390 aa, Glycine max
  Clone ID: TF_GmC324_2.pep
QSLILLTIGKAPARTGTESQFRPRPTPSIPKMNNPNGGICFLLFLFLFPFAAAQPATNQNQSYYNKFSPSMAIIIVILIAALFLMGFFSIYIRHCSDSPSASIRNLAAATGRSRRGTRGLEQAVIDTFPTLEYSAVKIHKLGKGTLECAVCLNEFEDTETLRLIPKCDHVFHPECIDEWLASHTTCPVCRANLVPQPGESVHGIPILNAPEDIEAQHEAQNDLVEPEQQQQDPKPPVPTEPQVLSLNQTLNRNRTRGSRSGRPRRFPRSHSTGHSLVLPGEDTERFTLRLPEEVRKQILQNPQLHRARSLVILPREGSSRRGYRTGEGSSRGRSSRRLDRGFKSDRWVFTMAPPFLVRASSIRSPRVANNGGEGTSAAASLPPPPAVESV

SEQ ID NO: 33201 - protein, 394 aa, Glycine max
  Clone ID: TF_GmC166328_1.pep
MGWGRLGRHGSDSVDGAVAGPSTSATEPRRFPLAAQPEMMRAAEKDDQYASFVYEACRDAFRHLFGTRVAVAYQNETKLLGQMLYYVLTTGSGQQTLGEEYCDITQVAGPYGLPPTPARRALFVVYQTAIPYIAERISSRIASRGIVLADYESAEGFGENAHRSHSAQISGTSPSSSSGQSVTTLSRLKGKMSAFWLHLVQRWPTMLPFVRELLQLVLRANLMLFYFEGLYYHISKRAAGIRYVFIGKASNQRPRYQILGVFLLIQLCIIAAEGLRRRNLTSITGSVHQASFATHDRSAGHGLPVLNEEGNLATPDIDKRSWVSESSSSEYHATSGVSKCTLCLSNRQHPTATSCGHVFCWNCITEWCNEKPECPLCRTPITHSSLVCVYHSDF

SEQ ID NO: 33202 - protein, 144 aa, Glycine max
  Clone ID: TF_GmC25364_1.pep
MASIRAFFTAIAFVAQSFQNYMIQSLHKLYKHYGYAAEVKDNEEKESDYCSVCLSQICKGEKAKSLPVCNHRYHVDCIGAWLKNHTTCPLCRNNITDHITQKHKQVKSLGESLFNLIQSFSDLLVAILYMMLPSTITESFPLVH

SEQ ID NO: 33203 - protein, 204 aa, Glycine max
  unsure (1)..(204): unsure at all Xaa locations
  Clone ID: TF_GmC1100_1.pep
DKLRDELSCAICLEICFEPSTTPCGHSFCRKCLRSAADKCGKKCPKCRQLISNGRPCTVNTVLXNTIQLLFPQEVEARKEASALNTNLRNDRRQPFRGASTTTSSTQQDEDAALARMLQRQIDEQRSPGTTRTRFARLRARRGGVSTSQHEDAALALRMRREEFMQTYRGSSQSSRLPSSLLAREKLRAMVSRAMNRREDLRQG

SEQ ID NO: 33204 - protein, 35 aa, Glycine max
  Clone ID: TF_LIB4281-017-R1-K1-D11.pep
RDGNNMRVLPCHHEFHRTCIDKWLKEIHRYVKIGI

SEQ ID NO: 33205 - protein, 274 aa, Glycine max
  Clone ID: TF_GmC836_1.pep
MSFVFRGTRADIENGFPGFIPERRALRVHATRPSNSNSLTFLVTVLLLFMILNSHQMSPNFLLWLVLGVFLMATMLRMYATCQQLQAQAQAHAAAASGILGHTELRLHMPPSIALASRGRLQGLRLQLALLDREFDDLDYETLRALDSDNVSTAPSMTEEEINALPVHKYKVSGPQCGGSSMQQASSSTPAEKKQDNSNAVGSMKASDDDLTCSVCLEQVNVGDVLRSLPCLHQFHANCIDPWLRQQGTCPVCKFRAGSGWSDNGHNDIIADMV

SEQ ID NO: 33206 - protein, 149 aa, Glycine max
  Clone ID: TF_GmC836_3.pep
FNCALLVRKFDDLDYEPLRALDSDNVSTAPSMREEEINALPVHKYKVSGPQCGGSSMQQASSSAPAEKKQDNSNAVGSMKASDDDLSCSVCLEQVNVGDVLRSLPCLHQFHANCIDPWLRQQGTCPVCKFRAGSGWSDNGHNDIIADMV

SEQ ID NO: 33207 - protein, 343 aa, Glycine max
  Clone ID: TF_GmC41583_1.pep
MHFHFHLTHIIFSLIFNLSKAQSSMEPVPAYITHHSWEPSVAITVAAIIFALLLMAIISVYLRRCAQSHIIITTTTLPCSCSQGINKDLLNTFPTLFYSNIKDLNKANQTLECAVCLTDFTHKDSLRLLPKCNHVFHPHCIDSWLTSHVTCPVCRANLSQESSCHVSITVPPHGEEGSLGNMTTTTTTTEATQVEQRPSNDINQDCVGDPTSTSDTTKIIYISEEQHSSSELACEVELGSKTNVRNSTITNIGDGVVASERNLSRSNSTGHSLVEEQGKGVERYTLRLPEDVRRYILVNHGRSVQRSASVKGGCWSDSEESYVGKRVEKRWVICTPPFVAQHD

SEQ ID NO: 33208 - protein, 103 aa, Glycine max
  Clone ID: TF_GmC342_4.pep
GDMRLDVDNMSYEELLALEERIGNVSTGLSEETLSKLLKQRKHSVEKGSETDAEPCCVCQEDYGDGNDIGTLDCGHDFHSSCIKQWLMQKNLCPICKTTGLAT

SEQ ID NO: 33209 - protein, 207 aa, Glycine max
  Clone ID: TF_GmC871_2.pep
MADPKAYWCHECDMSVSLTLPPSPLLCPHCHTHFLELMDSPTLSQNDTESSLFDVVFQDALLLLNPPSSKPRPLPSLHVTPSLLSSLDPNGVVRCAVCKDQITPHAEAKQLPCKHLYHSDCITPWLELHASCPLCRFRLEEEEEEGGDGVMTKIRREIIARLTVLTEEDFYGLRTTLNHIASRHALIQENENRGAQIGETQGGDSAC

SEQ ID NO: 33210 - protein, 202 aa, Glycine max
  Clone ID: TF_GmC127299_1.pep
MRRRTNYSPIPSPLHQPVPLSIPWVPAINDRDHMYLNLAPIIIIVIAGTTCIIFFLITLFKILRYYYPNRYNVSRSNPPILFDIRGDSPFSDDEEHDQAIRHPIWFIPTEGLQQSIIDSITVYKYRKDEGLVKETECLVCLGEFQQEESLRVLPKCNHAFHIPCIDTWLRSHKSCPLCRAPIVLDVATVLVVAPSLPHMFLT

SEQ ID NO: 33211 - protein, 359 aa, Glycine max
  Clone ID: TF_GmC723_1.pep
MANFTSFSSSLSHLLPLSSPSSSAAFDDSSEDSCSICLEPFSVHDPSTVTCCKHEYHLHCIIEWSQRSKECPICWQSLALKDPASQELLAAVEDEKCMRSRNIANSRAPLGQLNESHDDSCSDDSDFDDQIMKRLVSAARRAHFVQRQERKRSPSAGPSEALGVNSSMHVSEVQTTLTTSSSGGSLPASGVPSTVSIQPPALNTTPESARRPNTSEISFPESFKSKFSAASARYKESISKSTLGLKEKLLAHNVSVKELSKGVQREMNAGIAGVARMIERLDLSSKRSSAPLIAVHSVATSDFPSSGKSVEENGIGGSPSKENGGAVHDVSSDVPPLVTNMQSFRTKTPPFLQSGHGMV

SEQ ID NO: 33212 - protein, 263 aa, Glycine max
  Clone ID: TF_GmC12959_3.pep
MASLGSPSSFWCYRCNRIVRVPQNHAVLLCPDCNSGFLEELQTPPHSRRSTRGGGGSPFNPVIVLRNANDVVSPETRNFELYYNDAVSGSSGPSSLRPLPQGVSEFLMGSGFDNVLDQLDAAAGGAGALPPTAASKAAIESMPVVKILASHTYAESHCAVCMENFEINCDAREMPGGHVYHSECIVPWLSVRNSCPVCRHEVPSDEVEESNNNTVGLTIWRLAEGGFAVGRFIGGRELPLVYTEMDGGFNGANGVPRRVAWDS

SEQ ID NO: 33213 - protein, 173 aa, Glycine max
  unsure (1)..(173): unsure at all Xaa locations
  Clone ID: TF_GmC43458_1.pep
DTNVVMIHSVLLCAVIYSLGLNSIIKCVLRCSIIVINNNDPSSSSVSNNKPSPRLANTGIKKKVLKTFPTVSYSTEMKLPGLDIXCVICLSEFANGDKVRILPKCNHGFHVRCIDKWLSSHSSCPKCRQCLIETCKKIVGSQIQPVPPVPESTIIRIQPLEPEGLERNYREVC

SEQ ID NO: 33214 - protein, 439 aa, Glycine max
  Clone ID: TF_GmC258_1.pep
MAEPHSTAAILPPSTARLEETPSGSSQTPLRSGRGGWSIVDGSFAIVRDNTCSCFVVVFSLWFFVSMTMILGVYGSMTIVLGPKSSIVFQPSPVFVQSVKVENLKANPGPGPILYGTYRYPPLDVVTTWGESINVSLPSGSYKEWKYYLNCGSSINISYHVSSKSSSVFLIIAEGDVSLTRWLEDPTEPNTTLSWNVIHGTGMITQDIFWSSSYYVALGNLDEDVEVALNLSIRASLHNTTNAFYKCDLANGPCSLNLLFSDGSAAVLVTPGPQQNASNEWYVKLSYGPRWVTYIFGIGGLTLLVFGAFNFLNKLQCAHEDRAGVRSEGTERQRAPLLPHKDDDLSSWGSSYESLPQDEKDLGFLPGGPIDGKTLVDGETSNNTRHLCAICFDAPRDCFFLPCGHCVACFACGTRIAEAAGTCPVCRRNMKKVRKIFTV

SEQ ID NO: 33215 - protein, 375 aa, Glycine max
  Clone ID: TF_GmC121969_1.pep
LKSLANKCAEQVLEIKSLKTLTEKLQKENQELEFVLDMHGLENYDKRYSEVRESESKAHSQAEMLKNALDEHSLELRVKAANEAEAACEQRLSAAEAEIEDLRSKLDASERDILELTEAVKVKDAEAEAYISEIETIGQAYEDMQTQNQNLLNQVIERDDYNIKLVSDSVKTKQAHNTLMSQKQALAKQLQQINTSIENSKTRITHSEEQMKAILSDAIKCNQEEKHLAVTLEFAKWELADAEKELKLLKSAVSSSEKEYDQIQKDTEAIEMELESERSLRKKLEEELRELNCKIDELTSETGETTIQKLEKEIRICKNMIKCTVCTDRPKEVVIVKCYHLFCNPCIQRNLELRHRKCPACGTAFGQSDVRFVKI

SEQ ID NO: 33216 - protein, 214 aa, Glycine max
  Clone ID: TF_GmC67144_1.pep
MSLPQTATSPPPHLYPQELQLKLYQTFIFSIPILFSIILFLLFYLFYLKRRASSLSSTPHLLPRTIANPPTTSPYHSSPCRLDLTLHFLDKLPRILFDEDLLARDSLCCVCLGEFELKEELVQIPYCKHVFHLECIHHWLQSNSTCPLCRCSIIPTTKFLNPAPPINIISTDPPQQHGAIISDFPLQILSLPPQPQDHQEVVGASSNAANLSRE

SEQ ID NO: 33217 - protein, 232 aa, Glycine max
  unsure (1)..(232): unsure at all Xaa locations
  Clone ID: TF_GmC96_2.pep
MEELSAGPLVPAVVKPEASKGAAVAADTSEGXASGGTFPASTSEPDKDFLCPICMQIIKDAFLTACGHSFCYMCIITHLRNKSDCPCCGHYLTNTNLFPNFLLDKLLKKTSARQISKTASPVEHFRQALQKGCDVSIKELDTLLSLLAEKKRKMEQEEAERNMQILLDFLHCLRKQKVDELNEVQTDLQFIKEDINAVEKHRMELYRARXRYSXKLRMLDDSGGRKSWHSSM

SEQ ID NO: 33218 - protein, 140 aa, Glycine max
  Clone ID: TF_GmC57441_2.pep
PSPEEDVFPLVICAETTSNSVIDASPHMQITQAVLEKSNGIGPFQVKVVRQILWIDDIRYELRELYGIGSSTVADFDDNDPGKECVICMTEPKDTAVLPCRHMCMCGDCAKALRLQSNKCPICRQPIEELIEIKINNGNE

SEQ ID NO: 33219 - protein, 221 aa, Glycine max
  Clone ID: TF_GmC342_3.pep
ICSSRFSPSSDAIGSPSHNYSSLRSGLSTSEPRALSSGSGANPRSASWLERQGDSEFGIPYSLRTLAVASEGGSSRLVSELRNVLGLMRRGGNVRFEDVVILDHQSFLSGIADVRDRHRDMRLDVDNMSYEELLALEERIGNVSTGLSEETLLKHLKQRKHSAEKGPQIDAEPCCVCQEDYGDEDDIGTLDCGHDFHSSCIKQWLMHKNLCPICKTTGLAT

SEQ ID NO: 33220 - protein, 229 aa, Glycine max
  Clone ID: TF_GmC23452_1.pep
MISSGINLVMTVIGFAVSTMFIVFVCTRLICARIHLNAARRSFPIASRSNLSMMERGCHGLERVTVAKFPTKKYSDKFFAAAENSQCTVCLSEYQGEDMLRILPYCGHSFHVTCIDLWLQQNSTCPVCRISLREFPDRKRLMQPLFSSALQPHYDIESFDNRHYHCMIADNGLSSRTPDNHAVNPIEEDHFPSEGDGAVAMDNITCLSEGDFIKDEGKKHVESPSNFRI

SEQ ID NO: 33221 - protein, 129 aa, Glycine max
  Clone ID: TF_GmC170148_2.pep
CNCCMSKKLVDHICREKGLETNCPICCDFLFTSSESVRALPCGHFMHSACFQAYTCSHYICPICSKSMGDMSVYFDMLDALLASEELPEEYRNQCQDILCNDCHEKGTAPFHWLYHKCGFCGSYNTRLI

SEQ ID NO: 33222 - protein, 331 aa, Glycine max
  unsure (1)..(331): unsure at all Xaa locations
  Clone ID: TF_GmC1361_1.pep
MEGSVNERLHFGKMGYGCNHYRRRCRIRAPCCNEIYSCRHCHNDAASLLKNPFDRHELVRQDVKQVVCSLYAIYLPISDTGTISIEEIAELEHHVAMISTYDVIFVPSHCADXRPALLGTNLSGHDVQHVVFLVCDTEQPVAQVCTNCGVKMGEYFCKICKFFDDDTGKKQFHCDDCGICRLGGRENYSHCSKCGCCYSTSLRDNHLCVENSMRHHCPICYEYLFDSLKDIAVMKCGHTMHSECYLEMLKRDKYCCPICSKSVMDMSKAWKRIDEEIEATVMPDDYRYRKVWILCNDCNDTTEVYFHILGQKCGHCSSYNTRAIAPPVLSQ

SEQ ID NO: 33223 - protein, 251 aa, Glycine max
  unsure (1)..(251): unsure at all Xaa locations
  Clone ID: TF_GmC1701_1.pep
PAAIEVRNHVSPEPEPESEEDSSCCCPICLGPFLQLSYLDKCFHKFCFNCILRWTKVVAGKHRSPPSSVKCPLCKFYLIKXHRYRLQCYYTEQGFLDDIFNISQYWRSLKYNQPNCWLENWLRREIQALIQEEDVDIILHHILAVVKAALWTRREQKSHMNAPEKKQEEFKMSVSEAARPFLAARTDRFVYEIQLFLASGMNIEAYDAAYIQRLGWSSPGVNTEVSHSELVDRSTVIPYMHLFDGDFDENE

SEQ ID NO: 33224 - protein, 196 aa, Glycine max
  Clone ID: TF_GmC122884_1.pep
MEFWNRRLLLQNEDVPLSMPPLSHTHTKHATNASSSSPPQSSAFQFQSPLQVSIPPVFSSSVAYVFLILFTTFFFVGFVFLYFRQFASDAAAAGSYRRRWEEGAAAAAEAKKCLPVVAHCGEGCAECAICLEELREGDAVKMIPYCKHVFHPHCIDTWLDKHVTCAVCRCSELLCGEEVVGSVSARRQEEVVLNLD

SEQ ID NO: 33225 - protein, 238 aa, Glycine max
  Clone ID: TF_GmC938_1.pep
MSSGGGGGKPFFCHVCSQRITCSDESEPFCPMCMESFVEECNPNNPNPNLFPDSDESSDPELPFHRFSLLPLLLSSVSRSRSEPDVFDPMVFLQNHLQDLRADGANIQVDFDHPSNENQGFRLANIGDYFMGPGLEQFIQQLADNDPNRYGTPPAAKDAVENLPTVTVDDDLLNSELNQCAVCQDEFEKGSKVTQMPCKHAYHGDCLIPWLRLHNSCPVCRYELPTDDADYENEVSRW

SEQ ID NO: 33226 - protein, 184 aa, Glycine max
  unsure (1)..(184): unsure at all Xaa locations
  Clone ID: TF_GmC10535_2.pep
MGGCCCSARKPHLQGAPVYYYCPPTFEERESLTSNDGLNASVNAGFLIGLNLEASMPDTFQPPPVPLPYDMVLGGSASTDSESGRETVSSFETSITREDVEESDCKAQANSALTSPKKAQLPKSNVTQELVTEEEDVCPICLEEFDVENPRNLTKCEHHFHLSCILEXLERSDSCPICDQEMIF

SEQ ID NO: 33227 - protein, 258 aa, Glycine max
  Clone ID: TF_GmC260_1.pep
MAMIPYHLCRLPYQDSLKALEADIQHANALAAAIPRAKGETLLQMKLVYNHLAPLFLLFLQWMDCSCAGFLHRYLDLFHILIYKVHNDGRSIMPTHGRKATIGDFYAVILPSLQRLHGSLEKLEVVKEEGQSSIEGPSYGKKVIEEGVKLTANVDLQREDECGICLEPCTKMVLPGCCHAMCIKCYRKWNRKSESCPFCRGSLRRVNSEDLWVLTCNDDVVDAETVSKEDLLRFYLYVSKLPKDHPDALFLMYYEYLI

SEQ ID NO: 33228 - protein, 117 aa, Glycine max
  unsure (1)..(117): unsure at all Xaa locations
  Clone ID: TF_LIB3242-254-Q1-J1-B6.pep
MALDQYFEEAMPQLDSFEDKSFLETWKCDSDDIADSDRNASGVFDCNICLECVQDPVVTLCGHLYCWPCIYKWLNFLSASCENEEKQQCPVCKSEISQSSLVPLXGRGQTELPSKGK

SEQ ID NO: 33229 - protein, 383 aa, Glycine max
  unsure (1)..(383): unsure at all Xaa locations
  Clone ID: TF_GmC631_1.pep
MHSQKVVEMEDKTESHMSSAAAFVEGGIQESCDDACSICLEEFGASDPSTVTTCKHEFHLQCILEWCQRSSQCPMCWQPISLKDPTSQELFEVVEQERSLRATPSRNAAIFHHPAFGDFELQHLRMSLNDADFEERIIQHLAAAAAMRRANQLGWREGQRARSSAHGHPQFLVFSNQPIAPSSVAGGENDPTAIPNRSPSTPITSVGNEASQQILHLQTQSSSSASGSPVMATNPRGIYSNERGSTACSSPANQDRAEPSELQSFSDSLRSRLNAVSMRYKESISKGTRGWKERLFSRSSSMSKLGSEXRRREINSGIASVSRLMESLETSENNRVVGTSLSNHTEGCSIGGVSNQNNVEARGENSSHDDNTPAACSANSHLN

SEQ ID NO: 33230 - protein, 178 aa, Glycine max
  unsure (1)..(178): unsure at all Xaa locations
  Clone ID: TF_GmC67144_2.pep
MSLPQTATSPPPHLYPQELQLKLYQAFIFSIPILFSIILFLLFYLFYLKRRASSLSSSSHLLPRTIANPPTTTPYHSSPCRLDLTLQFLDKLPRILFDEDLLTRDSLCCVCLGEFELKEEVLQIPYCKHVFHFECIHRWLQSNSTCPLCRCSIIXTTKFLNPAPPINIISSDPPQHGA

SEQ ID NO: 33231 - protein, 261 aa, Glycine max
  Clone ID: TF_GmC871_1.pep
MADPKAYSIVVLLHFFPPPPPPPQLPPRMAATATAEAKTYWCHECDMSVSLTLPPSPLLCPHCHTHFLELMDSPSLSQENDAESSLFDVVFQDALLLLNPNPNPNPKPLPSKPLPLPSLYVTPSLLSSLDPNGVVLCAVCKDQITLNAQAKQLPCQHLYHSDCITPWIELNSSCPLCRFRLEEEEEEGGDADADADAVMTEIRREIIARLTELTEEDFYGLRTTLSHIASRHALIEENQNHRAQIGEPRGGGGGGGGDSAC

SEQ ID NO: 33232 - protein, 301 aa, Glycine max
  Clone ID: TF_GmC292_1.pep
GSRIKVKCYATWCGWRFSGSVPSSDTTTEEFLNENQVDHPVWLIATVGLQESIINSITVCKYKKNEGLVEGTECSVCLNEFQEEETLRLLPKCNHAFHVPCIDTWLRSHTNCPLCRAGIVSNSVNSEAPAPVSNSEQENANLGRNQDTLLDNSRINEGGLSSNMVAGESSEAIDESNSKDRVNDETQNNGVLMNIEIQTEMGSVSTTECESHRVVDDHKHDDDTMLHTDNLGKQDQDGDYYYSKTCKTVRRSSIEECLHLSPVSMKRSFSSCNGRTLTSRGYMSLNSKLNSSLLEFSFYER

SEQ ID NO: 33233 - protein, 153 aa, Glycine max
  Clone ID: TF_LIB4164-019-Q1-K1-G8.pep
QVRFGLLVWQNLCAICLDPLSHKSKGSKAIFTAQCSHAFHFACISSNVRHGNVTCPICRAQWTQLPRNLNSGSTISTNRSDPILQILDDSIATFRVHRRTLLRSTRYDDDDPVEPDDAPEIHKLRFSLAPIPPKAPTSHLSPHPLSCGSSSLL

SEQ ID NO: 33234 - protein, 170 aa, Glycine max
  Clone ID: TF_GmC1275_1.pep
MGFPVGYPELLVPKMFLHALSLLAWLRSLVFALFRLLRISDLLDTDSAASDLPPPPPPREPTLSALLIREFLPVAAFRDLAAADGDPPPSGCAVCLSEFSSEEEIRCMANCKHIFHRWCVDRWVDHDQKTCPLCRTPFVPHHKLEEYNQRLWAASGVSQFYYQDDYTASL

SEQ ID NO: 33235 - protein, 212 aa, Glycine max
  Clone ID: TF_GmC1703_1.pep
MGGCCCCCSSKETVLSAPPAYYYYPRASEEHVPLSSHPGAASAFSGRLLVDTNLDTSSPDTYRPPPAPIPFNVTLGTTQTPPAAQEIRSDKNNTSLPSTNSNAIQEPVARDIHGTSAKLEEPKESECKVQTDLELDSAKGSEIELAKSGKPIDLVEEEDACPICLEEYDAENPKLATNCDHHFHLACILEWMERSETCPVCDQDLVFDPPIE

SEQ ID NO: 33236 - protein, 213 aa, Glycine max
  Clone ID: TF_GmC1703_3.pep
MGGCCCCCCSAKETVLSAPPAYYYYPRASEEHVPLSSHQGAASAFSGRLLVDTNLDTSSPDTYRPPPAPIPFNVTLGTTQTPPAAQEIRSDKNNTSLHSTNSNAIQEPVAGDNHGTSAKLEELKESDCKVQTDLELDSAKGSEIELAKSGKPIDVVEEEDTCPICLEEYDAENPKLATNCDHHFHLACILEWMERSETCPVCDQDLVFDPPIE

SEQ ID NO: 33237 - protein, 140 aa, Glycine max
  Clone ID: TF_GmC1254_1.pep
HRHVPHPSCDGLADIMIIRGRIMMGGRFNSHDQFRDWRLDVDNMSYEQLLELGERIGYVNTGLKEDEMGLNIRKVKPSSSNDTSKHQLDKKCSVCQEEYESDDELGRLKCDHSYHFQCIKHWLEHKNFCPVCKQEVVVRH

SEQ ID NO: 33238 - protein, 337 aa, Glycine max
  Clone ID: TF_GmC1038_2.pep
MSEAPPPPTADASPPPYWCYHCEKRVSVETLANLPDVVCGECKNGFVESMPTPSRSRSPSASSDDPYFGSQFLQVLRLIAQSARDDDASPPPPPSRSPENDFLRIELGGWDNDEENENDDDNGDEEFEEHEEAEDRSGNEDPHGGDDEDLRRRRRELLRLRIRDLATRTRSMRNRILDWAEILMGLEDNSIEFRLQLPESDRYVGNPEDYVDAAEYEALLQTLAESDGGGRRGAPPASKAALEALPTVKIASESEAVACAICKDLLGVGDAAKRLPCGHRYHGDCIVPWLSSRNSCPVCRFELPTDDKEYEEERVVIAASSNSNGASSSGGGGSAIV

SEQ ID NO: 33239 - protein, 510 aa, Glycine max
  Clone ID: TF_GmC1008_1.pep
MQSSHMGLGGREQCGVMEMDVNQVTQSAPDSPPFCDTKGSDNDCSDQDSEHPLPPGRLENSSLNRASTGNGNLKERMGQLRSESSASETEGLARDLKRQKNLDFKPGKDPGAPLPTNASIDLCPIGRICSFCQSSKISEVTGPMLHYANGNLVTGDAAMKPNVIPVHRICIDWAPQVYFVGEVVKNLKAEVARGAKLKCSKCNLKGAALGCYVKSCRRTYHVPCAMDISDCRWDHEDFLLLCPVHSNVKFPCEKIRSKKKATQKHPTFSHLPSHHSNRLEASQDASKKLVFCGSALSNEEKVFLINYASKVGATVTKFWTSNVTHVIAATDAHGACSRTLKVLMAILNGRWVLKMDWIKACMQEINPVEEEPYEINLDNQGCQGGPKAGRLRALANEPKLFSGLKFYFSGDYVSTYKEDLEELIEVGGGTVLRIKEELEAHRHECKGDSSKLLVVYNLDPPQGCKLGEEVSILWQRLNDAEDLAANTLQVIGHTWILESIAACKLQPFVY

SEQ ID NO: 33240 - protein, 155 aa, Glycine max
  Clone ID: TF_GmC25542_5.pep
RAARADSARDYFHCMKCNGCLGIKWASHKCLEKGLEMNCPICCDDLFTSSATVRALPCGHYMHSSCFQAYTCSHYTCPICSKSLGDMAGYFGMLDALLAAEELPEEYKDRCQDILCHDCNRKGTSRFHWLYHKCGFCGSYNTRVIKCETSNSSCS

SEQ ID NO: 33241 - protein, 481 aa, Glycine max
  Clone ID: TF_GmC1166_1.pep
MLIGTLPQGQTDMHPQVSTLKHPLIKQMYQALLMIIFCLHQVAGMFYAVPENYVHQPSNSNYDRQAFSAADGGIIDLTMVHGRGPQKRKIPGIPPVCERGSTSRYFNATNAADRPTSSELWPEKPNMDSLYMPWDHVNMTPTFRGRGLSIRGEGPLRNVRSRSALDLESNLARTHLSNTHPHNSYSTGLPIDHSNMVDLSTQTSGTLTRDWSPMSICPPHGRVSSSDANAFNHEASHFLIGSSSSNAPVDVGGFHNEFGTSRNPTAPQSFHNNLTQTARGVHSNYSQRSTPTFRASSSLRLGRVAPSDDGLHMVSESYSSRQPRPLTTVGWQNNNRNGRSRIPSDRYRSLDDEGFMIVDRTSLYGPRNMLDRHRDMRMDIDNMSYEELLALGERIGHVSTGLSEDLISKYLTETIYCSSEQSQEEEACAICLEEYKNMDDVGTLKACGHDYHVGCIRKWLSMKKVCPICKASALPEDKKGK

SEQ ID NO: 33242 - protein, 285 aa, Glycine max
  unsure (1)..(285): unsure at all Xaa locations
  Clone ID: TF_GmC1166_3.pep
GLPIDHSNMVDLSTQTSGTLTRDWSPMSICPPHGRVSSSXHFLIGSSSSNAPVDVGGFHNEFGTSRNPTAPQSFHNNLTQTARGVHSNYSQRSTPTFRASSSLRLGRVAPSDDGLHMVSESYSSRQPRPLTTVGWQNNNRNGRSRIPSDRYRSLDDEGFMIVDRTSLYGPRNMLDRHRDMRMDIDNMSYEELLALGERIGHVSTGLSEDLISKYLTETIYCSSEQSQEEEACAICLEEYKNMDDVGTLKACGHDYHVGCIRKWLSMKKVCPICKASALPEDKKGK

SEQ ID NO: 33243 - protein, 133 aa, Glycine max
  unsure (1)..(133): unsure at all Xaa locations
  Clone ID: TF_GmC705537_1.pep
PGXNELIEQITENDRQXXAPAPERAIEAIPTVKIESAHLKENSQCPVCQEEFEVGGEARELQCKHIYHSDCIVPWLRLHNSCPVCRHEVPVPSSSSSSEGDECVGDGARGYSPSNSPTLFSRANRRQPSCCIL

SEQ ID NO: 33244 - protein, 510 aa, Glycine max
  Clone ID: TF_GmC279_1.pep
MFFNQKIVLFKSFALMGTSNLLLFFSLMSLCAMAASKVVLIGNNITLSFDDIEANFAPAVKGSGKYGVLYLAEPLDACAELTNKVEQLPNASSPFALVVRGGCSFEEKVGLAQKAGFKAVIVYDNEEGGILVAMAGNSAGIRIHAVFVSKASGEILKKYAGLTNVEIWLIPTFENSAWSIMAISFISLLAMSAVLATCFFVRKHRIRRERPRASLVREFHGMSSRLVKAMPSLVFTSVLEDNCTSRTCAICLEDYCVGEKLRILPCCHKFHAACVDSWLTSWRTFCPVCKRDARTGLTDPPPSESTPLLSSTPASMASSVLSSARSSLASSSAIQIARTASMASSALPSARSSLASSSAIQIARTASMASSALHSARSSLASSSAIQISRAASQTPSVSRNHSIASTPYVQPSLRSSYHQSPSLSISRSSVDLRNASQRSLASHLNSPCSMGYPSLSSLNSRYMSPHIPSPSNASVSYMGSSSHQQHPLRYSESAASFSPFASTHSLPEC

SEQ ID NO: 33245 - protein, 230 aa, Glycine max
  Clone ID: TF_GmC6770_1.pep
MSKDKDGEEPLGIGLQVMLAAAFSLFGMILLIIIFHFCVKYFIRRQQRRRQNDLLYQISTQIAPIDVSSVEPRNSGLDPLIIASLPKLLYKQTDQFKQGEEVVECSVCLGTIVEDTISRVLPNCKHIFHVDCVDKWFNSNTTCPICRTVVDPKVQPEHGHLGATRLHNQVQPTAPPAEGGDELPDGNELERVGCSGLRIGSFHRMVSNRERSGRRTQSCDGSTIVDIERP

SEQ ID NO: 33246 - protein, 248 aa, Glycine max
  Clone ID: TF_GmC37985_1.pep
MSWNSRMEAHYNTISYPYNTAGSFIEYFEGLTYEHVNFIFSGASHAQESSYPSNSSFYKFGHCEPENNSYYRYSHGYEVNHHEPLVDEYRRPSENSLTINEQSPAVSTEWVEGGNTDTQDNSIECPRRHHSNSNDYQVIWQDNIDPDNMTYEELLELGEAVGTQSRGLTQEQISSLPVSKYKCGFFLRKKSRDERCVICQMEYRRGDKRITLPCKHVYHASCGNKWLSINKACPICYTEVFADKSKHK

SEQ ID NO: 33247 - protein, 246 aa, Glycine max
  Clone ID: TF_GmC635_1.pep
MTSASELFHSRRHRLGRNALDLGLDTELHAADSLRQLRLRHYYLRRHHPERASDRIDGRYRRSFVSESVDSEENVRSSLRGSSSERLPVGVVLARARLLQRLRGEPLSTNRQYDRDSFGEDPESESSNEDPSGASLVTELTSQMARSQFLQELSTKPPGLTQEALDCLHQEVFSSNASEIGLDSRVLQDCSICLESFTDGDELIRLPCGHKFHSVCLDPWIRCCGDCPYCRRCIVVNTHSSLNEDE

SEQ ID NO: 33248 - protein, 236 aa, Glycine max
  Clone ID: TF_GmC635_3.pep
MTSASELFHSRRHRLGRSALDLGLDTELNAADSLRRHYHLRRLRHHPERASDRIDGRYRRSFASESVDSEENVRSSLRGSDSERLPVGVVLARARLLQRLRGEPLSTNRQYDRDSFGEDRESELSNEDPTRASLVSDLTSQMARSQFLQELNTKPPGLTQEALDCLHQEVFSSSGNEIGLESRVLQDCSICLESFTDGDELIRLPCGHKFHSVCLDPWIRCCGDCPYCRRSIVVIN

SEQ ID NO: 33249 - protein, 246 aa, Glycine max
  Clone ID: TF_GmC340342_1.pep
MESKYFDSNGEVSLKQKSKSISAEPTISTSEYDCFDCNICMESAHDPVVTLCGHLYCWPCIYKWLDVQSSSVEPYQQQTCPVCKSEISHTSVVPLYGCGTSNSESNAKKLQMSLGIPHRQPPCSLNAMLTSPRSRISHPSQQLHPSYFQTQSRPFHYQQFYGSYGTNGLPYLGGASMTSFFNTVIDMFGEMVLTRIFGISDANLFANPLNGSGSSRMRRQEMQIDKSLNRLSIFLLCCIMLCLLLF

SEQ ID NO: 33250 - protein, 184 aa, Glycine max
  Clone ID: TF_GmC6834_2.pep
MAFQHYISRDLKTIPNAVTEAENPNGCFDCNICLDFAHEPVVTLCGHLYCWPCIYKWLHVQSDSLPPDEHPQCPVCKADISNSTMVPLYGRGHAATTAEGKTASCDVFIPPRPSASCAQALLATSQRGQHLPYRNPYQGHYFTSHPYQEEDDATSQMLQSWIPSPPCDWGCLGEMVYAQGCLAT

SEQ ID NO: 33251 - protein, 61 aa, Glycine max
  Clone ID: TF_GmC37342_3.pep
CFICRNTFVDPVVTKCKHYFCEHCALKHHAKNKKCFVCNQPTLGIFNVAHEIRRKMAEDKS

SEQ ID NO: 33252 - protein, 239 aa, Glycine max
  Clone ID: TF_GmC5679_1.pep
MDYLDHDHDHDPFHDHDDFNRRILIMAIVSLSVVLVLVFALHLYARVFLRRQTRRRAAIYQLSLNVAQAHAEPHNNTGLNPALITTLPSFPFKQNQHHDSAECAVCLSVLEDGEHVRLLPNCKHSFHVSCIDTWLSSHSTCPVCRTKAGPVQLEPVRLEPQPREGPTGLVLADVVAPTAPLLFENVEGTSDGANNNGSPKVSGSNSRLSSFRRILSRERSMRRILPSSHDDVEHDLERQ

SEQ ID NO: 33253 - protein, 226 aa, Glycine max
  Clone ID: TF_GmC7726_1.pep
MTRAFRILGSADNATSLAAVAAPPEAVALESDFVVILAALLCALICVVGLVAVARCAWFRQGSGGGSSPRQALANKGLKKKVLQSLPKFAYVDSNPSKWVATSECAICLADFAAGDEIRVLPQCGHGFHVPCIDTWLGSHSSCPSCRQILAVTRCQKCGRFPAPGAGASRTPATEPELKSREDNNVASYSNNNINNNSDRGGNNSNSNCNMEHHHHSHHVNSGFLP

SEQ ID NO: 33254 - protein, 324 aa, Glycine max
  Clone ID: TF_GmC166463_1.pep
MKFCKKYQEYMQGQEKKLPCVGFKKLKKILKKCRRNSSSQKPLHASLAAKTCPDHCPVCDGTFFPSLLNEMSDIVGCFNQRAQKLLELHLASGVRKYFLWIRGKLQGNHTALIQEGKDLVTYALINAIAIRKILKKYDKIHYSKQGQLFKSQIQSMHKEILQSPWLCELMAFHINLRETKVKSRKAHALFDGCSLTFKDGKPALTCELFDSIKVDIDLTCSICLDTVFDPVSLTCGHIFCYICACSAASVSIVNGLKSADPKMKCPLCREGAVYEGAVHLEELNILLSRSCQEYWEQRIQTERVERVKQIKEHWDSQCRAFVGV

SEQ ID NO: 33255 - protein, 170 aa, Glycine max
  Clone ID: TF_GmC1667_2.pep
MGFYAEDTLSGLTIGQAIYEVALMIAVLRWVLCLIFRVMNDRRRTESDETPAAEACCQKEYNNTLVLTTFGEIKERLPQTEETCAVCLSQLSVEDEVRELMNCYHVFHRECIERWLEHEHENHIPTCPLCRAPLLSSCCHHSSTTCVPPPQPSWAVERLLYLFGDDLLPC

SEQ ID NO: 33256 - protein, 117 aa, Glycine max
  Clone ID: TF_GmC999_1.pep
MASMKVTWVVVIMCMAVVGAPMMAQAMTCNDVTVNMAQCLSYLMQGGTPSTLCCSGVKNILGSAVTTVDKQTVCNCLKADAARYNINDQYAQALPGFCKVNVPYKISRSTNCASIRF

SEQ ID NO: 33257 - protein, 146 aa, Glycine max
  Clone ID: TF_GmC999_10.pep
RPLPYDADLRFFRSQREGLVSRREKGSSHLNEESEPLRGDVDADSESLNSGGKWNDTSEDGSKEYRSKSSVRLSSAKLTTGAGVVYSSSEEEDVCPTCLEEYTEENPKIVTKCSHHFHLGCIYEWMERSDSCPVCGKVMVFDETTD

SEQ ID NO: 33258 - protein, 184 aa, Glycine max
  Clone ID: TF_GmC56608_1.pep
MTRALRYLGERNSATDSAVVDSDFVVIFAALLCALICILGLVAVTRCGCLRRLRLSSSNATPQPPPASANKGVKKKVLRSLPKVTASAESAVKFADCAICLTEFAAGDEIRVLPQCGHGFHVSCIDAWLRSHSSCPSCRQILVVSRCDKCGGIPAPASSSSAPPLADSGDRLKGREEDANRFLP

SEQ ID NO: 33259 - protein, 551 aa, Glycine max
  unsure (1)..(551): unsure at all Xaa locations
  Clone ID: TF_GmC5631_3.pep
MGEGRRGGTSKLREAARRVAVAAAYACGSFSRRKALVDPVSIDNSCSLSATASNSSFLSPSTTKNSSEELTEETYSGITTNINNELHSKNLCAICLDPLSYHSKGSSPGQAIFTAQCSHTFHFACISSNVRHGSVTCPICRAHWTQLPRNLNNNLGPFTSSNQSDPILRILDDSIATFRVHRXSLLRSARYDDDDPVEPDETPESPKLCFSLVPIPPNAPTSYNPALQVTKHAXMSLPSIPSSSNLQLLVIATISTNAKTLCHVSLFQYELISLXKLSHERATDLVLVASPNGPHLRLLKQAMALVVFSLRHIDRLAIVTYSSAAARVFPLRRMTSYGKRTALQVIDRLFYMGQADPVEGLKKGIKILEDRVHKNPESCILHLSDNPTRPYHAVSMELPSTPIHRFHVGFGFGTSSGFVIQEFEEFLAKMLGGIVREIQLRICGAGEEVGSGRVIRIGEIRGGEERRILLDLGDCTHVYVEYSYIEGEIDECVRRTGETVVGVGEHKGDVSENGENTGGGGGGRSSSVESWDFHDPYMARRWAKHLHGYRL

SEQ ID NO: 33260 - protein, 205 aa, Glycine max
  Clone ID: TF_GmC747027_1.pep
MEREEGKQPPQKTPLHNQHEQANSDNNFVQQNNLQEQSGTFTTFASFESETEGESSFDDNDYDADFFLSQEFESELQFLESERSNDNGDDYDNEDDEHMEEDEIDVDELTYEELIELGDFIGQEKRGLSAHEICSCLHSHTFHSAENKSGIDRCVICQVEYEEGESLVAIQCEHPYHTDCISKWLQIKKVCPICNIEISAPKMVS

SEQ ID NO: 33261 - protein, 189 aa, Glycine max
  Clone ID: TF_GmC18_1.pep
IRLLLLHYVTIYLILHGCIFWGSITGRLPGVGLLARKRTEQNHRYEHQHHATCRQSYHLGESSLEPPWIPLTVLDETALKARQRLHKKLGHFFSSYRSSENPRKEGKVNQSSYEKKDGGIGRKLLESSWLLRGNKFKKDRKVCAVCLEDLGQEQQVMNLSCSHKYHSACLLPWLAAHPHCPYCRTPVQP

SEQ ID NO: 33262 - protein, 361 aa, Glycine max
  Clone ID: TF_GmC12124_1.pep
MNLETQPGTASYWCYSCTRFVHLSVQSTIACPHCQSGFVEEIRAGAGAEASPRHRLSPFPDDPLLLRRQGFRRRRREASGNRSPFNPVIVLRGPGDDSAAADHDGVSTFELFYDDGDGTGLRPLPPTMSELLLGSGFDRLLEQFAQIEMNGFGRPENPPASKAAIESMPTVEIGETHVETEAHCAVCKEAFELHAEARELPCKHIYHSDCILPWLSMRNSCPVCRHELPSDLETRVPSQIDEETIGLTIWRLPGGGFAVGRFSGGRRTGESHFPVVYTEMDGGLNTNGGAPRRISRSVRSNRVRESRGFGRVISNFFSFFGRIGSRNSSSGHGSVSRSRSHVSSIFNRSSRRHSRTWVMDD

SEQ ID NO: 33263 - protein, 120 aa, Glycine max
  unsure (1)..(120): unsure at all Xaa locations
  Clone ID: TF_GmC739933_1.pep
MERYLWNGYVQLLHKPINVIAHATSYGEESDIYNDDIVRGITVKGMAWNIIQKLPVQQFNSSKMFKLYNDSCCSICFQDFEYEEFVRTLPKCGHFFHXCIDKWLVQQGSCPMCRIFVSDL

SEQ ID NO: 33264 - protein, 159 aa, Glycine max
  unsure (1)..(159): unsure at all Xaa locations
  Clone ID: TF_GmC54233_1.pep
PIYAFYLELIIXMLHFPMYMCFFLMIFVNYGIPFLLIRQLSRTFCDFKVRVADYIRYRKITSNMNDRFPDATPEELNASDATCIICREEMTTAKKLICGHLFHVHCLRSWLERQHTCPTCRALVVPPENGTTAAAGQQGSQCVHNGEQLGQAVEAQLLD

SEQ ID NO: 33265 - protein, 170 aa, Glycine max
  Clone ID: TF_GmC54233_2.pep
KITSNMNDRFPDATPEELNASDATCIICREEMTTAKKLICGHLFHVHCLRSWLERQHTCPTCKTLVVPPENGTTAAAGQQGSQSDVHQRGTTGTGSGSTAQTEATDSLSRHQARLQAAAAAASIYEKSYVYPSMNSLVWYDIFPKMLSFTIFSLLTPKGTSCSCNPLISH

SEQ ID NO: 33266 - protein, 237 aa, Glycine max
  Clone ID: TF_GmC98_1.pep
MAFEEHYVSQELKTIPSSMTVTENLDGCFDCNICLDFAHEPVVTLCGHLYCWPCIYKWLHVQSASLAPDEHPQCPVCKDDICHTTMVPLYGRGQGIAHSDHDGKASSYRGSCIPPRPPALGAQSLIATSSQSVPYRNTYQNQHLYQEEDASSSQMLNPGATILAPGFPHLVFGMFGEMFYTRVFGNSENLYTHPNSYHLGESNNSPRLRRQEMQANKSLNRISIFLFCCFLLCLIVF

SEQ ID NO: 33267 - protein, 143 aa, Glycine max
  Clone ID: TF_GmC1701_2.pep
MEDDDAAIEVRNHVSPEPEVEDSSCCCPICLGSFLQLSYLDKCFHKFCFNCILRWTKVVASKHRSPPSSVKCPLCKTENFSIIYVVDGSCFQRHYVNQDFENSFILSRAHRYRVQCYYTEQGFVDDIFHISQYWRSQKYYQPN

SEQ ID NO: 33268 - protein, 68 aa, Glycine max
  Clone ID: TF_jC-gmst024166b09b1.pep
ICISSYEYGGDIHVLPCHHHFHYTCIVKWLKMNAPCPLCKSSILKANDTGVKSIRRSQIYNIELSFNI

SEQ ID NO: 33269 - protein, 444 aa, Glycine max
  Clone ID: TF_GmC7715_1.pep
MLYPLRARETSLSHSLSLSITLSHPLGFPFHRILSLQPRLVISMEGAGMEENNIINDDDNNNKSEAHLTSAAAFVEGGIQDACDDACSICLEAFCDSDPSTVTSCKHEFHLQCILEWCQRSSQCPMCWQPISLKDPTSQELLEAVERERNFRFNPSRNATIFHHPTLGDFELQHLPVGASDADLEERIIQHLAAAAAMGRARHIARREGQRNRSSAQGRPHFLVFSTNPNSPPMAPASSSPSQRGDDEPIPTIAVANLSPTPATGEESSQLTLVPPIQAEQVSASGSGSTALATDHQGSSYNNRRSPNQSSPSSQDRAGPSELQSFSESLKSKLNAVSTRYKESISKSTRGWKERWFSRNNTMSDLGSEVRREVNAGIATVSRMMERLETSDNNRSNSNSAPSNIEDGSVQEYNGQTLTPGNEGDGLLRDNNTKASCAAGSSSN

SEQ ID NO: 33270 - protein, 161 aa, Glycine max
  Clone ID: TF_LIB5118-039-A1-PF1-E1.pep
CLPWLSNISGYSYGIGISIGILLLIITITLTSYFCTRSQVSFAPATRNRRRTPNVLEPQHSIVDVSLDEATILSYPTLLYSEAKLKKSDSTATCCSICLADYKGTDMLRMLPDCGHQFHLKCIDPWLRLHPTCPVCRTSPIPTPLSTPLAEVVPLASRQDS

SEQ ID NO: 33271 - protein, 654 aa, Glycine max
  Clone ID: TF_GmC273_1.pep
MVSGWRRTFRTSNTIPQNTQEPENCNYCYDNNNINSSPKITSTNFSSSIPTLHSRTNSPLSKHNNNNARTPSPTKRNTPVSFHQSTPSSPNSPSTFSLLKSTLRLSKGSCEICMRSVKTGEGKAIFTAECSHVFHFPCLAGHVKKHRMVTCPVCNANWKQLQQNADENKGNAELKTTRSFKLHNYDDDEPLMSPTSVSRFNPIPESSENEEEEDEEQNDEETNFNVSSMIRTKNIDAFFSPEAAVVASNRSSETYVAVLNVKSQPRNAAANRPPADLVAVIDVGGSVSGEEYRMLKRSMQVVISSLGSADRLSVVAFSGGSKRLFPLRRMTGRGQMAARRVVDALSTVELRRDGTAARNNALKKAARVLEDRRQKNTVAKIILLTNSHEDQRLSSTRFDIHSLRYSYDGACNHAQHDHELAKRVGNLLSVAAQDFKLELKLTSRSAPAEISAVYSLAKGCTDALSPESVALGDLYAAEGREILVELKVPAGTASRGSHQRVISVRCSHRDPFTRELVISKERELIVPGPRTVRSCDPRIEQLRRCQVSARAVAESRRLMARNDVSGALELLSSARASVSREQGDECLRWLESEQAELRSQKLRSSCNNNCFDEKGEPLTPMSAWRVAERLAKVAIMRKSMNRVSDLHGFEDARF

SEQ ID NO: 33272 - protein, 81 aa, Glycine max
  unsure (1)..(81): unsure at all Xaa locations
  Clone ID: TF_7042560.pep
MVGDGRTCRKASXLVAKALGVETSQGEGFAANLFHCNVCLDTARDPGLTCCGHLFCWPCFHKLSYADSDVRKCPVCKGDVP

SEQ ID NO: 33273 - protein, 549 aa, Glycine max
  unsure (1)..(549): unsure at all Xaa locations
  Clone ID: TF_GmC278_1.pep
MGHRQLHNTSSLFDGEPDQNWNHLHTDQQCVHLGRTNTSENSSFIYPAENMSIDSISFPSHWNSSTRSNGYASSSHNIVVPPHXSDASGTYNDXFMYLSRTVSLFRASENYLHQPSSSNYDRQTFHVDAGFIDLTMGSGQGHHKRKSPGIPSVYEGGSTSRYFNAGSSTDLPISSELWQEKPNIDSQYMPWDHFTMTPTFRGTGLSIKGEGSLRNVRSRSTLDLDSNLSRTHLSSNHSHNSYPTVPPVDHSSMADLSGQTSGTLTRDWSQMNMSPANGRVLLSDTSSFGLETSHFLVGSGATASNASVDVGGFHHEFGASRNPTAPQSFHNTHTQTARGIRSNYSQRSTPTFRASSSLRLGHVTSDDGLPMVAESYSSRHPRPLSTIGWRNGDRNGRSRISSERYRSLTEESGLHDRFSSEGFMVVERASVYGSRNMLDQHRDMRMDVDNMSYEELLALGERIGYVNTGVSEDLLSKCLTETIYCSSEQSEDEGNCVICLEEYKNMDDVGTLQTCGHDYHVSCIKKWLSMKKLCPICKVSALPEDTKDK

SEQ ID NO: 33274 - protein, 551 aa, Glycine max
  Clone ID: TF_GmC278_2.pep
MGHRHLHNTSSLFDGEPDQNWNHLHTDQQYVHLGRTNTSENSSFIYPAENMSIDSISFPSHWNSSSRSNGYASSSHNIDVPPHQSDASGTSNDHFVHSSSAGPSLFIPLENYAHQPSSSNYDRQTFHVDGGFIDLTMGSGQGHHKRKSPGIPSVYEGGSTSRYFNAGSSTDLPISSELWQEKPNIDCQYIPWDHYCTMTPTLRGTGLSIKGEGSLPNVRSRSTLDLDSNLARTHSSSNHSHNSYPTVPPVDHSSTADLSGQTYVTLTRDWSQTNISPAYGRVLFHASGAFGLETSHFLVGSGATASNAASVDVGGFHHEFGTSRNPTAPQSFHNTQTQTARGIRSNYSQRSTPTFRASSSLRLGQVTSDDGLPMVAESYSSRLPRPLSTIGRRNGDRNGRSRISSERYRSLAESGLHDRFSSEGFMVVERASVYGSRNMLDQHRDMRMDVDNMSYEELLALGERIGYVNTGISEDSLNKCLTETIYCSSEQSQDEGNCVICLEEYKNMDDVGTLKTCGHDYHVSCIKKWLSLRKLCPICKVSALPEDTKDK

SEQ ID NO: 33275 - protein, 441 aa, Glycine max
  unsure (1)..(441): unsure at all Xaa locations
  Clone ID: TF_GmC665_1.pep
MEEETSDAMNLDLNLGPGPEPETGPMSNEAVNLDDWIGEPLQRISEAVRRARQRWRWRHLPLPHPEFHAHFPTEATRHFQIPPEARNISVELNHFLVNSGNGSALQAGEGSVAAEERMEEVPKACDNVNGVAEDXTSQKKEDVEKGSGNDGDFFDCNICLDLARDPVVTCCGHLFCWSCLYRWLHLHSDAKECPVCKGEVTLKSVTPIYGRANNVRGPEEDSALKIPPRPQAKRVESLRQTIQRNAFALPVEEMIRRLGSRIELTRDLVQPPEPDAARETAERTTSLLRFLTAQGIRREHQNLVAPPEDVMGLAQNNVNTSEAGDPRTRVQSHLLRRTQSHRATLSTLSSALTSAERLVEAYFRSNPLGRNQEQPPPPVDDRDSFSSIGAVINSESQLDTAVEIDSMVSLSTSSSRRRNDASRVSDVDSGDSRAPRRRRLN

SEQ ID NO: 33276 - protein, 293 aa, Glycine max
  Clone ID: TF_GmC187_1.pep
MFTFISFLHVAAILLLQEYRNTQSGAAKVSILMIGQQAIVDAYLCLTHLTAGILVESLFNAFATAAFFKFVVFSIFEMRYLLAIWKASRPLSNGEGWETMRRELSVLYSRFYGILLGGILLMYEFHNHLRPILLLVYSFWIPQIITNVIRDSRKPLHPHYILGITVTRLAIPLYIFGCPNNFLHIEPDQSWCVCLAIFVGLQAAILLLQHYFGSLWFIPRQFLPEKYCYYRRFAQDTNHATDCVICMTAIDLSPRSNDCMVTPCDHFFHSGCLQRWMDIKMECPTCRGPLPPA

SEQ ID NO: 33277 - protein, 196 aa, Glycine max
  Clone ID: TF_GmC1777_1.pep
MSQLGAVLRTQREPRRSTILGLLTEQMDGVDSGTRRRRSFKERFGFIGMGCCGATWGFRSDALSVTQGEQQQQETDPECVGPAGLGSGMNLAAALAAERQLRGPQEEAVRAPGTPWRVSLMRLLEETEAEKEKEKEKEENVVGNDSVCCVCMGRKKGAAFIPCGHTFCRVCSRELWLNRGSCPLCNRSILEILDIF

SEQ ID NO: 33278 - protein, 75 aa, Glycine max
  Clone ID: TF_GmC101798_1.pep
MPWPSICCPITKKLVICYICLVEYEDGDNMRVLPCHHEFHRTCIDKWLKEIHRVCPLCRGDICIFDSTPTENSSD

SEQ ID NO: 33279 - protein, 201 aa, Glycine max
  Clone ID: TF_GmC263823_1.pep
MTRGLRLLQSAAAPPPEAAAAVESDFVVILAALLCALICVVGLVAIARCAWLRRGPVAGSGSGAGESPATANKGLKKKVVNSLPKFTYAGGGDRCKWSECAICLTEFGAGDEIRVLPQCGHGFHVACVDTWLASHSSCPSCRAPFAVTARCHKCGHFPAVSAAAASESKAVGGDNAADSTANANRNNVIITNGFSNYGFLP

SEQ ID NO: 33280 - protein, 161 aa, Glycine max
  Clone ID: TF_uC-gmroLIB3259P159g12a1.pep
AIARCAWLRRGPVAGSGSGAGESPATANKGLKKKVVNSLPKFTYAGGGDRCKWSECAICLTEFGAGDEIRVLPQCGHGFHVACVDTWLASHSSCPSCRAPFAVTARCHKCGHFPAVSAAARRRRQWRMRMVIMLLLRMDLVITVSCLESCFSNYEFACKYR

SEQ ID NO: 33281 - protein, 371 aa, Glycine max
  Clone ID: TF_GmC57441_1.pep
MGISWSGRRRNNYLQNRPPPPPPSYYYHTESHPAPPPQPQGYFLPSATPYAPPPPMPPPPPPQTHSISFYYSSNPNSYGTPTLAPRFHYPQHYYHPQPQPQLAAWPVPRPAAPTPPPYVDHQTAKKIRNYVNVHKDTLRLEVDDHNPDLHLLSFVFDAVYDGSITILYFAKEEEKCRFVPLYPEAFQPVRIPFQKGVGQKFAQPSGTGIDLGFFELDDLSKPSPGEDVFPLVICAETSLKTTSEDETPGDSLLDASPHMQITQGVLEKSNGAGPFLIKVVKQILWIDDVRYELRELYGIGNSSAADFDDNDPGKECVICMTEPKDTAVLPCRHMCMCSECANAHRLQSNKCPICRQSIEELIEIKVNNGDH

SEQ ID NO: 33282 - protein, 183 aa, Glycine max
  Clone ID: TF_20075430.pep
LECAVCLNEFRDDETLRLIPKCCHVFHSDCIDAWLANHSTCPVCRANLAPKPEDAPSSVEIQLSDPARPIGPNEPGHDPNYINPVEEREGEQNRIVTEPPRVLDDPNRARPVRSKSTGFGIARLFPRSHSTGHSLVRPGEDCERFTLRLPEEVRDRLVRSATLNRTKSCGMTWQLESSERRGY

SEQ ID NO: 33283 - protein, 240 aa, Glycine max
  Clone ID: TF_GmC759_1.pep
MALDHFEETVHQKGNWKSSSEIIADSDRNASGDFDCNICLECVQDPVVTLCGHLYCWPCIYKWLHFQSTSLDDEEQQRPQCPVCKSEVSQSSLVPLYGRGQTTLPSKGKPRQVGTVIPQRPHGPRTLNTRSVSQPISQSYHPYSNPYHPQQHFNSIPSGYTSPMIRTTGSIDNTFGIFGEMIYARVFGNHVSNIHTYANSYNLSGTSNPRMRRHLMQVDKSLSRISCFLLCCLVLCLLLF

SEQ ID NO: 33284 - protein, 126 aa, Glycine max
  Clone ID: TF_LIB3138-015-Q1-N2-E3.pep
PTRDDYINQNLTPSPASDERACPICYENWNADTEQIIRTHCNHTFHRECFIAWLGKENVNSANSCPSCRAICYPKVEHQKETRLTLDMSFLYRTMRSEYITRISLARQSRAKKHTNQRRYDDEDGF

SEQ ID NO: 33285 - protein, 374 aa, Glycine max
  unsure (1)..(374): unsure at all Xaa locations
  Clone ID: TF_GmC857_1.pep
MMMSSGTSSYWCYXCSRFVRVWPHHTVVCPDCDGGFIEEIEHPPRSVHLDPRRHRHRFPAAAMYMIGQRPSSDPRPASSLRRTRRNGGDRSPFNPVIVLRGGAEDESRGFELFYDDGTGSGLRPLPPSMSEFLLGSGFDRPLEQLSQIEINGIGRYEHPPASKAAIDSLPTIEIDDTHLAMESHCAVCKEAFETSTAVREMPCKHIYHPECILPWLALHNSCPVCRHELPADTPNPNQNQNPSQNVALNEEENVGLTIWRLPGGGFAVGRFSGGRRGAERELPVVYTEMDGGFNNGGGEPRRISWSRGNRGRESGGLTRFFRNLFGCFRGSSTQRSASSRESMRASSSRSSTMDPSLRSRRTWSMDVNSGMRAW

SEQ ID NO: 33286 - protein, 100 aa, Glycine max
  Clone ID: TF_GmC4135_1.pep
LPIFKFKLKNNENGDDQDANSAIDEGGILAAGTEKERMISGEDAVCCICLAKYADDDELRELPCSHVFHVECVDKWLKINATCPLCKNEVGTSNGGSPSA

SEQ ID NO: 33287 - protein, 222 aa, Glycine max
  Clone ID: TF_GmC6815_1.pep
MCNTLKFNPFKNRLLIMFMLVLSLPFNVQSQAKDSEEQNLAELPQTVHPSKGIVIAVLSTMFAITLLLLLYVKFCRTIPHELLRQNSNLQNFQGLTRSRSRVSGIDKQVVETLPFFKFSSLKGSKEGLECTVCLSKFEDTETLRLLPKCKHAFHMNCIDKWFESHSTCPLCRRRVEAGDIKNLNFSLSSRFLRVPSNLTEDPNLEIFVHREPSHGGSASIQR

SEQ ID NO: 33288 - protein, 357 aa, Glycine max
  Clone ID: TF_GmC1738_2.pep
MSSQTAPTEAPEPYTPLLRSRTDAGRGPAPTLALLLGRAGRRGPSMLVRETAARELEERRADWGYSKPVVALDMSWNMAFVVVSAAMLACTTSEHPTTPIRVWIVGYALQCLVHVLLVWLEYRRRSRRDSRSGSQRARDVESDAGSGDDDDYSDDGDGSSGNTSRSRFAKRCESLNTGVSFLWWIVGFYWVVSGGDILLQDAPRLYWLAVVFLAFDVFFAIFCVVLACLIGIALCCCLPCIIAILYAVAGQEGASEADLSMLPKYKFRILSDVDKPSGGAGSMVPIETSSAYLENERTLLLEDAECCICLCSYEDGAELHALPCNHHFHSSCIVKWLKMNATCPLCKYNILKGNEQV

SEQ ID NO: 33289 - protein, 229 aa, Glycine max
  Clone ID: TF_GmC288365_1.pep
MSMQKESPLIRLHSFDQGHAWLALLHLLIHISPAVTGQPVTPPVQPDSNKSVIAIMAIVVIMFLISAFLSLYSRKCSDRPVQTRGILDLAGPTGAAGNPLQAESNGLNQATIETFPTFLYADVKGLKIGKDTLACAVCLNEFEDNDTLRMIPKCCHVYHPDCIGAWLASHSTCPVCRANLVPQPEDMNTNTNTNMPSILSIQIPNEEEREHEHEHEYEAVIVGEHIRGC

SEQ ID NO: 33290 - protein, 972 aa, Glycine max
  Clone ID: TF_GmC689_1.pep
AIELKCPICWSLLDSAVSLTCNHLFCNSCIFKSMKSASACPVCKIPFTRREVRPAPHMDNLVSIYINMEASSGVNTFVTQNAPVTNLSDGEKECEGDADSGKMKAGGTHEGRPQEKKTRKKKKSKKTVQASMESSGSEFAKPSFPAKKRVHVPQNLLSETPMKNLKIGDSLSEINKEKEGTEKVPVKESERPLQSEKDNPVLSPFFWLREEKDGEMLSQQTDEDQIIDGSTPNPPSFSDLKDSDDEVHSNVDLMDEVQNKSSVNLFDSEMFEWTQRPCSPELFSSPSKMQVMDTYEDDENQEELVASSLELEANLPRVDADNMEFENPKEGNRMADEVPPSVCFPQIRSSDDLNGIKKSTKRRKARDKNKQEQIGEPKNSFDEMYVEVTQEQALDNSSNLGKGSRRGKRVCFNTSPIPTPITACTVPNTLGVQSIGEMKKAKNIDILPCKQENEKHYAQEISGKSQMKISGKQNINQMNEFAGSDSSIFSLRTDNNGKDSNRRQCKSKYSRKTIYCSKELETTKRQKLSSACISKTKNNEEILPIESIHQGPDVRDLNDTSKEKHCPLMDQTVLRKCENLVKNYQCVFCLSSEESEASGPMVHYLDGRPVTSDYEGGSKVTHCHRNCTEWAPNVYFDGDYSINLDAEISRSRRIKCSFCGLKGAALGCYEKSCRRSFHVPCAKWTSQCRWDTQNFVMLCPLHASSMLPCEGSGSQKRSKKCTASEGKAHGPKHDTTSQSRAAYLSYKKIVLCCSALSVQEREVVSEFERVSKATVLKNWDSSVTHVIASTDENGACRRTLKVLLGILEGKWILNIEWIKACMKEMGPIDEECYEINVDIHGIRDGPRLGRLRVLNKQPKLFYGYKFYFMGDFIPSYKGYLQNLVVAAGGIILHRKPVSGDQESTSPDMHTYQTLIIYSLELPDKCKPSKKDTICSQRRHDAEVLASSTGSNVASNTWVLNSIAACKLQYLAQ

SEQ ID NO: 33291 - protein, 354 aa, Glycine max
  Clone ID: TF_GmC1038_1.pep
MPSKHKQTLQRFVSFHLRRTMSEAPPSQPSPPTANASPPPYWCYHCEKRVSIETLANLPDVVCGECKNGFVESIHTPSRSRSPSASSDDPYFGSQFLQVLRLIAQSARDDDASPPPPPSRSPENDFLRIELGGWDNDEENDNDNDNDDEEFEEHEEAEDRSGNEDPHGGDDEDLRRRRRELLRLRIRDLATRTRSMRNRILDWAEILMGLEDNSIEFRLQLPESDRYVGNPEDYVDAAEYEALLHTLAESDGGGRRGAPPASKAAVEALPTVKIASESEAVACAICKDLLGVGDLAKRLPCGHGYHGDCIVPWLSSRNSCPVCRYELPTDDKEYEEERVVNSASSSGGGGSAIV

SEQ ID NO: 33292 - protein, 248 aa, Glycine max
  unsure (1)..(248): unsure at all Xaa locations
  Clone ID: TF_GmC787101_1.pep
KNSGIDRSVVESLPVFRFGALRGQKEGLDCAVCLNKFEAAEVLRLLPKCKHAFHVECVDTWLDAHSTCPLCRYRVDPEDILLVEDAKPFRQSHQQQRNKEEERVRLNLDLEKQEIVESRRRHSSAWGGGRRXTEEQQQSRRWTTSFRRSPGGRSATSRKKNESVGVGCFVRPRKDGMLLTQETERASVERRLEHRIIVSPGQGPGPGPGPGPCGLEQRWSDLQASDLLYLTSEMIMMRDSWNGRGSGV

SEQ ID NO: 33293 - protein, 355 aa, Glycine max
  Clone ID: TF_GmC255_1.pep
MYAFSLNMVLHHRKLLLFPPPPPPLCRSACPEKFNDPLPPPNSPDDYLTQSPTKNIKISKYLIISFSIVATAFIVLSFYAIYAKFFSPRNRSIRRTLSRPETEQDFLDEEEQQQHGPVVDHPIWYIRTTGLQQAVITAITVCNYKKDEGLIEGTECSVCLSEFQEDESLRLLPKCNHAFHLPCIDTWLRSHTNCPMCRAPIVTDPTRVPSSMDPTAFETSSFVEEIFENSAENTQNSSDDLLRGEEEERVQEDEACEENLASELVVTVQQPRRSVSLDSSSAAKISLALATVVSGESHGDHSKRVGGNGNLATKGGSSSCSSTSSVKRSRSFNAKHLLSWYSRSQRKPNAPLRSF

SEQ ID NO: 33294 - protein, 267 aa, Glycine max
  Clone ID: TF_GmC765_1.pep
MPTQPDSPPNNNTLTQMFQNIFSDNSNIMLAAIISLLLVILFVLLLHLYAKWFLAQAQAQANARRRRRRRRTTVTVSDVLGPARFHHFHSFTIEDSSPLSTKGLDSSTIRTIPLFIYEHNNNNNKKVEEEEEELECVICLSAFKNGEVGRCLPKCGHGFHVECIDMWLSSHSNCPICRTSIVASIVENNSSDDHHGGDHDLVEIVTEGGSAAPSFETREGEHGNSNNGNGGARTSVSVVSENSSSEFFGCSLERMLGKGFPISSNVN

SEQ ID NO: 33295 - protein, 249 aa, Glycine max
  Clone ID: TF_GmC248_1.pep
MALDQYFDEAVPQLDSLEDKSSLETWKCGSDDIADSDRNASGGFDCNICLECVQDPVVTLCGHLYCWPCIYKWLNLQTASSENEEEKQQCPVCKSEISQSSLVPLYGRGQTVLPSKGKGHQVGVVIPRRPLGPTLDSATVSPPISHVYHRHYPNHPQQFNSIPGSYTSMFNTGGSLANAFDTTYGVFGEMIYARVFGNQMTNTYTYPNSYDLSRNSNPRIRRHLMQVDRSLNRITFFLLCCIVLCLLLF

SEQ ID NO: 33296 - protein, 141 aa, Glycine max
  Clone ID: TF_GmC119051_1.pep
YGTEHHVNDPESDPVLLDAIPTLKFNQEAFSSLEHTQCVICLADYREREVLRIMPKCGHTFHLSCIDIWLRKQSTCPVCRLPLKNSSETKHVRPVTFTMSQSLDESHTSDRNDDIERYVEPTPTAASNSLQPTSGEQEARQ

SEQ ID NO: 33297 - protein, 353 aa, Glycine max
  unsure (1)..(353): unsure at all Xaa locations
  Clone ID: TF_GmC281_1.pep
YDIVLNSQLEKYEKARDVILSGLQVDPFSNSLRASLQNLESVSSSSRGMSTHGHPERNDDFDCTLCLKLLYEPVTTPCGHSFCCSCLFQSMDRGNKCPLCRTVLFISPRTCSISVTLKNIIQKNFPEEYAERKQEHDSLIKAGVDLLPLFVMDVVIPCQRFPLNIFEPRYRLMVRRIMEGNHRMGMAILDSTGSLAEFACEVEITECEPLPDGRFYIEIESRRRFRIIHSWDQDGYRVAEVEWIQDIMPPEGTSERDTLQQQTYNAVEDARSWIARAKEAARHDQRKLERLASVEVMMPSPKDPERFSFWXLATLSNRRPAERLDLLRIRDTAERIRRGLIFLRQEEQGCRIQ

SEQ ID NO: 33298 - protein, 420 aa, Glycine max
  Clone ID: TF_GmC281_5.pep
MASSLSPSPSSLDQTLRDVDDYVLENGSEGLSRDTLHYVYELVKNGNVAFRENRMEEAINFYSRANNIKSGDPIILSNRSAAYIRISQYFMHRTPSSSERRPLSGLEPTTLAELGLKDAEKLVELQSNSAKSYLLKANAFLLLEKYEKARDVILSGLQVDPFSNSLRASLQNLESVSSSSRGMSTHGHPERNDDFDCTLCLKLLYEPVTTPCGHSFCCSCLFQSMDRGNKCPLCRTVLFISPRTCSISVTLKNIIQKNFPEEYAERKQEHDSLIKAGVDLLPLFVMDVVIPCQRFPLNIFEPRYRLMVRRIMEGNHRMGMAILDSTGSLAEFACEVEITECEPLPDGRFYIEIESRRRFRIIHSWDQDGYRVAEVEWIQDIMPPEGTSERDTLQQQTYNAVEDARSWIARAKEAARHGNF

SEQ ID NO: 33299 - protein, 130 aa, Glycine max
  Clone ID: TF_GmC7141_2.pep
MLDSVLLALFLPCLGMSGVFIVYMCLLWYATTRRNQPPIDGQPVKPVTDKGLSALELEKLPKITGKELVLGTECAVCLDEIESEQPARLVPGCNHGFHVHCADTWLSKHPLCPVCRTKLDPQIFTSQSPC

SEQ ID NO: 33300 - protein, 274 aa, Glycine max
  Clone ID: TF_GmC111084_1.pep
MSFVFRGSRGDIESGFSEYVPERTLMRVHPARPVNGNSLAFLITVILIFMILNSPQMLHHFLLWVVLAIFVMATSLRMYATCQQLQAQARAHAAAASGLLGHTELRLHMPSSIAIATRGRLQGLRLQLALLDREFDELDYDTLRALDSDTASSTRSMTEEEINALPIHTYKVPVPPKDGSAGLASSSGAAEIKQASGGTEAGAKGSEDELTCTICLDQVKRGELVRSLPCLHQFHANCIDPWLRQQGTCPVCKLRIGSVSGGNRESESDGSDIA

SEQ ID NO: 33301 - protein, 184 aa, Glycine max
  Clone ID: TF_GmC1390_1.pep
FILIIIIIFFHTFVRFCRRRRRRLFSRSLPTNSSAAASLDDPCLDPSVIKSLPTFTFSAATHRSLQDCAVCLSEFADGDEGRVLPNCKHAFHAHCIDTWFGSHSKCPLCRTPVLPATGSADTEPGSVSEAGEGCSSSSLPPPIGCPRKPLDINIIIEIPEVERGSDSVTGDQGFRWSLKRFCNV

SEQ ID NO: 33302 - protein, 75 aa, Glycine max
  Clone ID: TF_6964406.pep
HALSDNLCISARNHSHGFSASECQANQASATSEECTVAWGVCNHAFHFHCISRWLKTRQVCPLYNSEWEFQKYGH

SEQ ID NO: 33303 - protein, 170 aa, Glycine max
  Clone ID: TF_GmC63868_1.pep
MGFPVGYAEVFFPNPFLHTLALLGLLRNLVFFLLHLLGFSDFLETEVAWPDHPHPSDEAAAARPPSASALLIRDLLPVAKFGDSDVGAQQNGLCAVCLFEFSEEEEVRCLRNCKHIFHRTCVDRWIDHDQKTCPLCRTPFVPDDMLDDYNQRLWAAFGVNEFYADYTFSF

SEQ ID NO: 33304 - protein, 189 aa, Glycine max
  Clone ID: TF_GmC646_1.pep
GSEQLSGVMPVSPAEDDITHSLINRDSFGHYNMGGIAEVLLALERIEQDAELTHEQILLLETNLFLNGLNFYDHHRGMRLDIDNMSYEELLALEERMGTVSTALPEEAFAECLKRSIYQSAYTHECCNEDKDDIKCCICQEEYVVGDEVGDLQCEHRFHVVCIQEWLRHKNWCPVCKVSAALSNSFLPH

SEQ ID NO: 33305 - protein, 118 aa, Glycine max
  Clone ID: TF_GmC2052_1.pep
MSPSPTNLLQQFQSRGLNFIVVQSLPTFQFKKNEREQDKTISVECAICLGEFEEGEWLKRLPHCSHSFHVSCIGTWFQSHSNCPLCRSFVHHHILQCSIASHTLLQPLRREDFERVQR

SEQ ID NO: 33306 - protein, 353 aa, Glycine max
  unsure (1)..(353): unsure at all Xaa locations
  Clone ID: TF_GmC324_1.pep
MKTHIHIALFLLLVSPLIPIAVAQAQSQPNDFSDANLNQFSPSIAIIIVILVVALFLMAFFSIYVRHCADSPSTTVSPLTTARSRRAARGLDPALIQTFPILEYSDVKIHKIGKEALECAVCLCEFEDTETLRLIPKCDHVFHPECIDEWLGSHTTCPVCRANLLPTDSEDAIANGNANGVVPVPETFTRDIEAQNDAVQAAPEQQNAEADPVLPEPEVVSLDKTLNRNRTRGSRSNRPRRXSQDTERLTLRLPEEVRKQILQNPQLHRARSLVILPREGSSRRGYRTGEGSSRGRSSRRLDRGFKSDRWVFTMAPPFLVRASSIRSPRVANNGGEGTSAAASLPPPPAVESV

SEQ ID NO: 33307 - protein, 228 aa, Glycine max
  Clone ID: TF_GmC322738_1.pep
MTLLILILLIIIIPSPSFSVTMQNSPTVLAVPPPRPATQINVIPIPPSFDGAPNSVFPSTFLPFPPPPPFAGPPSSVDLSPLEFLLALLAVVTIPALIYTFIFAFGCPSRRRRREPSYGEPSVASEVSHHQEFEIAAVADTEVKYRKEAHAKEIGGECPVCLSVFANGEEVRQLSACKHSFHASCIDLWLSNHSNCPICRATIAVTTTKTGDGDSHLSHREPDATNLV

SEQ ID NO: 33308 - protein, 381 aa, Glycine max
  unsure (1)..(381): unsure at all Xaa locations
  Clone ID: TF_GmC480_1.pep
MEVPEMEGKTESHMTSAAAFVEGGVQEACDDACSICLEDFCKSDPATVTNCKHEFHLQCILEWCQRSSQCPMYFLPISNRDXLRDSTSRELLEAVELERILNDETLRNFVILHHADFEYXDLPQGVKEADIEERIKPNXTAAAPMRRSRHLSRREGHRTRPSAHGRPHFLVYSTQPSAPPSAAGGGSEPAAIPVGSPSTPLTFDGNEQSSLQQIPHVQTQSSSLTSASTVSTTNLQGVHSDDRSFASHSFPASQDRAQPSEQSFSDSLRSRFNAVSMRYKDSISKGTRGWKERLFSPNSSMSELGSEVRRELNAKIASVSRLMERLETRENNSAAGTSLSNHLVNRSIAETSNQSNVEARGENSLHGNNTPTTFSASSDSK

SEQ ID NO: 33309 - protein, 154 aa, Glycine max
  Clone ID: TF_GmC5808_1.pep
MGLSSLPAPSEGVLCVLLVNTVLSISIFKGIVRTILHIVGIHLPSSSTSPSSPDPSQAAPESFELHLSPSESYIEEFRSRTPTLRFDSVCCSKRLEHDCSVCLTQFEPESEINRLSCGHLFHKVCLEKWLDYWNITCPLCRTPLMPEDDTPCFQ

SEQ ID NO: 33310 - protein, 155 aa, Glycine max
  Clone ID: TF_GmC134317_1.pep
MKPLSKLLNKLCGKMIMLLASLLIELIILIQKLRESRPISTRQYIKLIEKKNPTICYTKRFNLKAEHATECRVCLSEFEQGEKLRKLKCQHTFHRDCLDKWLQQYWATCPLCRKQVLPDDVVFKHRQHQNQPEAASNGNHDNLLYLFSAFRGGNT

SEQ ID NO: 33311 - protein, 156 aa, Glycine max
  Clone ID: TF_LIB5118-055-A1-PF1-D5.pep
MNNSTNNKGNNGFDPSEFTYGVAFVIGLIFLLVSIALACVRLRMARGPNMLNILAGIPPSRHARSSEEDNSAEQGLHHIDKSFERYPKLLYSQVEKGSSSSSVVSSSCSICLGDYKESDTLRLLPHCDHLFHLACVDPWLRLHSTCPICRKSSIHA

SEQ ID NO: 33312 - protein, 251 aa, Glycine max
  Clone ID: TF_GmC410_1.pep
MTSSLVKIQGEQVLTNDFQDLSIKDLSEKGTEAEIHKVGSYGSHGGICAICLDKIVLQETALVKGCEHAYCVTCILHWATYREKVTCPQCKHPFEFLNVHRSLDGSIQDYMFEESVCLLLRASWFTPLSVEEHVVHEDAYEDLEDYYQYEDDDDDDDMDEVYYGGSSSLRVIGNRRWGDNGYVRAGRQEARPVHRPNFQDSGASSSSHEPKKKEAGKIITGRRAKRAQKREAADKAAEAKHQQHLVRLGRK

SEQ ID NO: 33313 - protein, 179 aa, Glycine max
  Clone ID: TF_LIB5119-032-A1-PF1-B9.pep
MTSSLVKIQGEQVLTNDFQDLSIKDLGEKGSEAEIHEVGYGGHGGICAICLDKIVLQETALVKGCEHAYCVTCILHWATYREKVTCPQCKHPFEFLNVHRSLDGSIQDYMFEESVCLLLRASWFTPLSVEEHVAHEDVYEDLEDYYQYEDDDDMDEAYYGGSSNLRVIGNRRWGDNGYV

SEQ ID NO: 33314 - protein, 230 aa, Glycine max
  Clone ID: TF_700873011_FLI.pep
MTSGFGESTRASAPSPSCSGNSSNDAGDFECNICFDLAQDPVITLCGHLFCWPCLYRWLHHHSHSQECPVCKALVQEEKLVPLYGRGKTQTDPRTKLYPGMEIPHRPSGQRPQTMPPPPPPEVNPFGSYGFGLMGGFIPMATARFGNFTLSTAFGGFIPSLLNIHFHGFQDATVYGTTSGYPFGFNGFHGGNARGFMQATGQVQRQEDNVLKNLLMLIGFLVLLTVIFVW

SEQ ID NO: 33315 - protein, 230 aa, Glycine max
  Clone ID: TF_GmC543_1.pep
MTSGFGESTRASAPSPSCSGNSSNDAGDFECNICFDLAQDPVITLCGHLFCWPCLYRWLHHHSHSQECPVCKALVQEEKLVPLYGRGKTQTDPRTKSYPGMEIPHRPSGQRPQTAPPPPPPEANPFGSYGFGLMGGFIPMATARFGNFTLSTAFGGFIPSLLNIHFHGFQDATVYGTTSGYPFGFNGFHGGNTRGFTQATGQVQRQEDNVLKNLLMLIGFLVLLTVIFVW

SEQ ID NO: 33316 - protein, 313 aa, Glycine max
  Clone ID: TF_GmC25299_1.pep
MESEDLVKQELEELQKQLGKKQKFEASVSSLKTLLQRTYPSASPALRKSFYSVLCRVATVLKTRYTAPGFWNAGLGLFEQAHLLVSDPSEKEHLKACIAQAREHLHLEDNPSQTLRPADNQANRGYLFEGHLTVDPEPPQPQWLVQSNLLTTAATLFAAESSQASEANETTQDDATNMLEDLLNRLEEVVPLMVDVGPVAPKAPPASKEVVANLPVITLTEEILANLGKDAECAICRENLVLNDKMQELPCKHTFHPPCLKPWLDEHNSCPICRHELQTDDHAYESWKEREKEAEEERKGAENAIRGGEYMYV

SEQ ID NO: 33317 - protein, 355 aa, Glycine max
  Clone ID: TF_GmC285_2.pep
MADVTTYLRHHPDSDPNPNPNPNPNPNPDDDQTLIPFPYWDLDFDFDPEFPSNTLSFTDRENQVNFIMDLFHQSVEQSQLTDPLSNDAVFGAIDGIDLGFPAADDFFVGQRFSVGSDESHTHPHTLAANDDGVLGFCAHSNENDDVASIPLCWDALQLEENNNNNNTYEDFEWEEVMDERDVISMLDDTVSVSLGIEEETEAAAAEEDAESEVSILEWQVLLNSTNLEGPNSEPYFGDSEDFVYTAEYEMMFGQFNDNAFNGKPPASASIVRSLPSVVVTEADVANDNNVVVVCAVCKDEFGVGEGVKVLPCSHRYHGECIVPWLGIRNTCPVCRYEFPTDDADYERRKAQRSVM

SEQ ID NO: 33318 - protein, 213 aa, Glycine max
  Clone ID: TF_GmC342_1.pep
RKKKIGTIYPGNSGSWCLVFCFCLADSGSDDSQHLELPNLNKSSGSANECIPPNVGSGSFLLPSGNNAFLVEDTDGRPSCSLDTRRVSCKRKAVEGNNGQSSDAGSSSYSQHTDGSAWHTIPTQDNAGSSSRRSIPSEEVNARLGLGIGDEASENVSDSKTAGCSESFHRNFRLRLNPSNPANSVPPTAFSTGSMIRHSGVSILSSIPKTSFC

SEQ ID NO: 33319 - protein, 211 aa, Glycine max
  Clone ID: TF_GmC989417_1.pep
MKVSQYMLLVVLVWHSSLCANAQWNNPINYSPFDETNKGGNYSKVTWSVSLSCVFVSILVFILFKLRACCCCCYSSSSSQRHNTKLVAATEAIEKCPIFEYSTAKELKVGNGAEECSVCLVEFEDSDTIKMLPKCQHVFHQNCIDTWLPSRMTCPICRQKLTSQDTVIDIDDDDVVPMEQLEHDIGTEITESEVAVTDETDTGTVVEQVLV

SEQ ID NO: 33320 - protein, 185 aa, Glycine max
  Clone ID: TF_GM651B23rgnG1.C1.o45.ma.pep
MKVSQYMLLVVLVWHSSLCANAQWNNPINYSPFDETNKGGNYSKVTWSVSLSCVFVSILLVAATEAIEKCPIFEYSTAKELKVGNGAEECSVCLVEFEDSDTIKMLPKCQHVFHQNCIDTWLPSRMTCPICRQKLTSQDTVIDIDDDDVVPMEQLEHDIGTEITESEVAVTDETDTGTVVEQVLV

SEQ ID NO: 33321 - protein, 191 aa, Glycine max
  Clone ID: TF_GmC3662_188.pep
MAYPFSDFKYSDGLTVVGISFCTAIVCEAISWVLIYRTNSYKNLRSSIDKASKKLETMKTDSNKINIKKSKTKKIDRVETSLKESSRDLSLFKFKSGGVVALVLFVVFGLLNSLFEGKVVAKLPFKPFGLIMKMSHRGLQGNDPTDCSMAFLYFLCSISIRTNLQKFLGFAPPRGAGAGAGLFPMPDPKTS

SEQ ID NO: 33322 - protein, 306 aa, Glycine max
  Clone ID: TF_GmC730_1.pep
MSSGTTYWCYTCRQPIWLEGREAICPYCDGGFVQELNELRGVARQHGFSSRMEDAHQMPDIMDAVRAVMEQRGSEPRIRVRDAVDNFMRQRMAGRYTNFDVRRRSGSGSGSGSILIPDETWGVFSSGPYLIFHGQAPGFTNSNGSSRGGPRRVDFGDYFLGPRLEGLIEQHISNDRLGPPPASHSSIDAMPTIKITHEHLQSDSHCPVCKERFELGSEARKMPCNHVYHSDCIVPWLVLHNSCPVCRVELPPKEHTSSRGRRIWGNGSGSGSSNDISRGRENRQMNNGRRNLLSYLWPFRTSSSST

SEQ ID NO: 33323 - protein, 84 aa, Glycine max
  Clone ID: TF_GmC107734_1.pep
MVALPSVEVRHDGRECVICKEEMGIGRDVCELPCQHLFHWMCILPWMGKRNTCPCCRFRLPSDDVFGEIQRLWEVLVKMTAKDS

SEQ ID NO: 33324 - protein, 403 aa, Glycine max
  Clone ID: TF_GmC1165_1.pep
IYALSYFVCRFVYVELLEIRKDVQCPICLGIIKKTRTVMECLHRFCRECIDKSMRLGNNECPACRTHCASRRSLRDDPNYDALIAALYPDIEKYSQEELEFREEEKNRNKQIQASIAKVVQRQSEALVKRRKDTPGEFVTRPQRNQRNIHSRRQTQAIEGSEDNEEENDNNEKDSSSADERSTEHRQRRRKRWARVRPSQPSSSMTSPDGGCNDSDMDISKENRGISRQVSKHGKLTWGRGGFRSNTRHGSGGGSNSKSSRSSRLSKFVDHLRNLDENTDEFDVHLMLVSLDQLSTPSLQQPYLCCRPTLSVKHLYEHVARQTPLPVEGIEIVAVKGCCSTNCDKSADENSALAYDELSKLVIDPHKDELEILQGHETLAGLRSKCISKMGHLIIAYKQKEVS

SEQ ID NO: 33325 - protein, 250 aa, Glycine max
  unsure (1)..(250): unsure at all Xaa locations
  Clone ID: TF_GmC1801_1.pep
MGTGWRRAFCTRDPASTISDKHPGSPSPSPRTCTRLGFLSGGSNPSTPRLRCTTKAETASQTVTLSDSPRVQSKNTPRATKSPSVSNPTSPRSPLKLSLFKNSFKFRSSCGICLNSVKTGQGTAIYTAECGHAFHFPCIAAHVRKHGSLVCPVCKATWKDADAWADAWVAPESAEKDNVVAVQRNNNASPVFKTYNNHVEQPSKHSDSTRSYNDDEPLLSPPPAXRIIPIPEADENAEDDEDEDPGEFQG

SEQ ID NO: 33326 - protein, 221 aa, Glycine max
  Clone ID: TF_GmC1801_2.pep
SSCGICLNSVKTGQGTAIYTAECGHAFHFPCIAAHVRKHGSLVCPVCKATWKDVPLLAAHKNLAPESAAKDDVVAVQRVTESPYPNANDKKPTENNNASPVFKTYNNHVEQPSKHSDSTRSYDDDEPLLSPTSGGRIIPIPEADENAEDDEDEDPGEFQGFFVNPKNSSSSKSYSDSLQTSDGDSRTVQVKLMPECAVISASRTHETYALVLKVKAPPPPP

SEQ ID NO: 33327 - protein, 191 aa, Glycine max
  Clone ID: TF_GmC12487_1.pep
MGDVLSPFTISSPPPPSSPSTKSNSMPMLYYGLVVVGTAAIVLAIYNLVLLRRSHTRHALPSQSTGQNRDIVRVPEMRTRSFEDSQQRNLLSSFKYKKEVVAKEEEQEEEEQDDDEFECSVCLSVYEEGEEVRKLPQCKHYFHVLCIDMWLYSHLDCPICRTPVDVVGPLCPLENSPDGMMESGGGIPSSL

SEQ ID NO: 33328 - protein, 431 aa, Glycine max
  Clone ID: TF_GmC1017_1.pep
MGLGNDEEEDNNNNDKVVDDGDVGGGKSFGSVSCSICLEVVADNGDRSWSKLQCGHQFHLDCIGSAFNIKGAMQCPNCRKIEKGQWLYANGCRSYPEFSMDEWTHDEDLYDLSYSEMSFGVHWCPFGNLARLPSSFEEGEFSSSAYHDVLGQHAIFAEHTAVSSASHPCPYIAYFGPIHPSSSNSGGTVSEASNFNHWNGSSVPSDMPTSYTFPAVDLHYRSWEHHSPPFSTASSRLVAADQPSVSPGSQRPARGGSDVPRSGSFMHPFLVGHSSAARAGSSVASSMIPPYPGSNARARDRVQALQAYYQPQQPPNSTTMRTPIASGTRRSSSHNGPAQLAPMATSPDQGGGFFLIPSSSSGRNFQEENHHLPNHFHAWERDHLPSLSLNHVDRDSGWRAYHQATSRSDPATRSSSFRLRHGSDRMPSQNR

SEQ ID NO: 33329 - protein, 435 aa, Glycine max
  Clone ID: TF_GmC1017_2.pep
MGLGNDEEEDNNNNNNNNKNNNDKVVDDGDAGGGKSFGSVSCSICLEVVADNGDRSWSKLQCGHQFHLDCIGSAFNIKGAMQCPNCRKIEKGQWLYANGCRSYPEFSMDEWTHDEDLYDLSYSEMSFGVHWCPFGNLARLPSSFEEGEFSSSAYHDVLGQHAIFAEHTAVSSASHPCPYIAYFGPIHPSSSNSGGTVSEASNFNHWNGSSVPSDMPTSYTFPAVDLHYHSWEHHSPPFSTASSRLVAADQPSVSPGSQRPARGGSDVPRSGSFMHPFLVGHRVGSSVASSMIPPYPGSNARTRDRVQALQAYYQPQQPPNSTTMRTPIASGTRRSSSHNGSPQLAPITTSSDQSGGFFLIPSSSSGHNFQEENHHLPNHFHAWERDHLPSLSLSHVDRDSGWRAYHQATSRSDPGTRSSSFRLRHGSDRTPSQNR

SEQ ID NO: 33330 - protein, 364 aa, Glycine max
  Clone ID: TF_GmC480_2.pep
SSLHWVQEACDDACSICLEDFCKSDPATVTNCKHEFHLQCILEWCQRSSQCPMCWQPISLRDTTSQELLEAVELERSLRDTPSRNAAIFHHPALGDFELQHLPMAMNEADIEERIIQHLTAAAAMRRSHHLGQREGHRTRSSAHGRPHFLVYSTQPSAPPFAAGGESEPAAIPVGIPSTPLTFDRNEQSSPQQIPYFQTRGSSLTSGSTVATTNLQGVHSNDRRFASHSFPASQDRAQPSEQSFSDSLRSRFNAVSTRYKESISKGTRGWKERLFSPNSSMSELGSEVKRELNAKIASVSRLMERLETTRENNRAAGTSLSNPNHLVNCSIAETSNQNNVEARGENSLRDNSTPTTFSASSDSK

SEQ ID NO: 33331 - protein, 230 aa, Glycine max
  Clone ID: TF_GmC480_3.pep
MEVPEMEGKTESHVTSAEAFVEGGVQEACDDACSICLEDFCKSDPATVTNCKHEFHLQCILEWCQRSSQCPMCWQPISLRDTTSQELLEAVELERSLRDTPSRNAAIFHHPALGDFELQHLPMAMNEADIEERIIQHLTAAAAMRRSHHLGQREGHRTRSSAHGRPHFLVYSTQPSAPPFAAGGESEPAAIPVGIPSTPLTFDGNEQSSPQQIPIPQTRSSLTSGSTVAH

SEQ ID NO: 33332 - protein, 748 aa, Glycine max
  unsure (1)..(748): unsure at all Xaa locations
  Clone ID: TF_GmC12020_1.pep
MSILPSQTQAASSSSSSAPSPNPNSQHGIGIPIPQPFPSLSPSPINLTFGSLQISDTPGSSASAAQDSGGSSEKVTEVGSPSGVMVSPQQNSRTGSRSHGGRRTGMGTGTASYHRNQQTPGSVHSHGSAPSAGRKAQTVNGNYLLNFQYDPISRSQPRGPPPSPTTTRRHRKRKPYNKXLFLQANYKFMVLGLGNYSPESMDPDKMLQWEDIICVTYLTPFSVQCPICLEYPMCPQITTCGHIFCFRCILQYLLMGEEDHKGDSWKRCPLCFVMISAKDLYTLHITNVKQYQVGDNVEFTFLTRKKDSFTLSLKNKRETNTTSGVDGDICDPFSKFTLISDVDLSVKHAISDLDGWLARADSGLVDDLEKLPYVCAAMQQLEQRKRYWSEHRSHDSEKSSMIIDCGHQIPSTVANSMDTDDENCSNGSITSSSDFLDQNKVMMLDKSTAGACSDQNLDVEKELIEQEMNLSSSYEEKNDNQRHSEGVIGDVKENSSYSFYQAADGQHLILHPLNMKCLLHHYGSYDMLPHRISGRILQLETVTQTEAIRRRYRFLSHFPLTTTFQLCEVDLSEMLPPEALAPFIDEIKKRANQRKQLAKKEKKEKIKAEATAAYSLPISLSHQFTSRDDPPTFSMDDFEALGNSTISSSPPLAGERKSFSNVTRLGFAAAHDSPSLQIQETSGLHNNNRTSDSSVSTGLRNGETQSYSNVISRAESNISSNAPKTNELGKKGKKPNRVLLSTAGGRRY

SEQ ID NO: 33333 - protein, 331 aa, Glycine max
  Clone ID: TF_GmC5879_1.pep
MTTFTHSIFHHDLLFLFYFFLLTEFPPQATAQPPNTLTPPPQQDRFTRLKFDKSMAIVLLILVVVFFILGFLSVYTRQCAERRMGGRFDLSILISRRQRGLGREVIETFPTFVYSTVKSLKLGRATLECAVCLNEFEEVETLRFIPNCSHVFHSECIDAWLANHSTCPVCRANLFPKPDDPSFDPIQIPDPEQPVISSPTRAETGGSNPRSPNLIDQNPTSRSRSTGFRIAGWFPRSHSTGHSLVQPGENCERFTLHLPEEVRNQLMLSRTKSCGVGVTFTRENSERRGYRARSVGSSLSPHVRGWFSVKDDVGERSSDRLFSTSTRDSEV

SEQ ID NO: 33334 - protein, 134 aa, Glycine max
  Clone ID: TF_9903085.pep
VVLAVIVCAFLCALGLNTMLQCVFQCANRVLTEPLQWIASRRLNSGLKKREMVALPTSTYTHSCASPSSPSNNICAICLTEFSDGDRIRFLPNCNHRFHVDCIDKWLLSHSSCPTCRNLLKPTDSVHSLHTVVS

SEQ ID NO: 33335 - protein, 194 aa, Glycine max
  Clone ID: TF_GmC3662_37.pep
SFSWHYTELDDRDLEIRGRTLFFVIVLFSIILLVTVLFIYTRWVCRYQGRLPTTAFTAAAAHAPPLAQPQGMDPASIKKLPIILHHAPSDREESAWDETECCICLGEFRDGEKVKVLPACDHYFHCDCVDKWLTHHSSCPLCRASLKVESSFPGVRKGHIIFLNATCWIKVLKDVALLSHPCVWSTNWICGPAS

SEQ ID NO: 33336 - protein, 175 aa, Glycine max
  Clone ID: TF_GmC3662_86.pep
MSNPDTRSFNWHYTELDDRDLEIRGRTLFFVIVLFSIILLVTVLFIYTRWVCRYQGRLPTTAFSAAAVHAPPLAPPQGLDPASIKKLPIILHHAPADRDESVWDETECCICLGEFRDGEKVKVLPACDHYFHCDCVDKWLTHHSSCPLCRASLKVESSFPKILIQEPPLRIDFQF

SEQ ID NO: 33337 - protein, 336 aa, Glycine max
  Clone ID: TF_GmC1204_1.pep
MSSGATHWCYACRQPIVLDGRDPVCPYCDGGFVQELDELRGIAPNHNHTFSSQSGDFHQMPDIFDAIHAFMGQRGSDQRFGLMDAVDNFMRHRMAGRNSNFDVRGRSGSLPVPEQSWGVYSSGPYLIFHGQVPGFTLSAGSPRGGPRRVDFGDYFMGPGLEELIEQLTMNDQRGPAPAARSSIDAMPTIKITQAHLRSDSHCPVCKEKFELGTEAREMPCNHIYHSDCIVPWLVQHNSCPVCRVELPPQGQASSRGTRSWGGRNASNSSSSGSNDSSRGRENSHQNHGRRNPFSFLWPFRSSNSNNNHYSETGGSSSSTTPDQNNGTSYSGWPFDR

SEQ ID NO: 33338 - protein, 332 aa, Glycine max
  Clone ID: TF_GmC4746_1.pep
MAEERVPLVSLERVPLVSLDDGIVGARDSSSSSSSSTYQRYDIQQVAKWIEQILPFSLLLLIVFIRQHLQGFFVTICISAVMFKSNEIVKKQTALKGDRKVSVLLGISFAFMLHVISIYWWYRNDDLLYPLAMLPPKTPPPFWHTIFIILVNDTLVRQAAMAFKCLLLIYYKNGRGHNFRRQGQMLTLVEYTLLLYRALLPTPVWYRFFLNKDYGSLFSSLTTGLYLTFKLTSVVEKVQCFVSALKALSKKEVHYGVHATTEQVNAAGDMCAICQEKMQAPILLSCKHMFCEECVSEWFERERTCPLCRALVKPADLRTFGDGSTSLFFQLF

SEQ ID NO: 33339 - protein, 169 aa, Glycine max
  Clone ID: TF_GmC1492_1.pep
MGLQNQLNDVSSGSIPLLVLAQIATCVNYLRSMLFALLQTLGLSRFHSDQIVDERFLAAVGSGLAGLIMLSDQLTLSSQFFHHHHGTAAGHDHDHDHHPCVVCQATFEDGDQVRMLPCRHVFHRRCFDGWLHHYKFNCPLCRSPLFSDERVALTERRLGQQLISWFSLH

SEQ ID NO: 33340 - protein, 165 aa, Glycine max
  Clone ID: TF_GmC1492_2.pep
MGLQNQLNDVSSGSIPLLVLAQIATCVNYLRSMLFALLQTLGLCRFHSDQIVDERFLAAVGSGLAGLIMLSDQLTLSSQFFHHHHAGAGGHDHHPCVVCQATFEDGDQVRMLPCRHVFHRRCFDGWLHHYKFNCPLCRSPLFSDERVAVTERRLGQQLISWFSLH

SEQ ID NO: 33341 - protein, 778 aa, Glycine max
  Clone ID: TF_GmC1055_1.pep
MNSDNQQQSEEPGNAQKSLEHSADIAQPQSPNQTTAGTSTLTAEDTEKPKCAVCGEENAKMHYGVLACLGCKGFFRRALKKLNEYECLRNNNCIIDKQERNSCRSCRLQKCLDVGMDPAAVRPDRDFTGKQQLARRFSHSKGSSNHKSSQPMGKCSGERKGGGRDEETAGNWAHRLPVEMRTMVMTLQNIEAKVVHGDTAKDAAEIYPLRVNTIREIIEEPTKLRGRRTEMRYEPYRMAKNEEFSVIVYRRLIAAIDWVELLAERMGGLSIEDRIALVKSCFGPLTLFKCSARTAVVTSNENLLCLCNFAYVPREINKAYNDAYHLENGLVDRLLNELVAPFRKIHLAEEEIVCVSAIIVLNPMARDLSENAAEKVFQLRNRVYTTLYQIIKECRPNCNTNATFGNLLLYLPIITSLANAMSDNLRFAQTFSAHGGSPLLTSLFGCFPVEPFVDSEMALVKAVEGKCIAEKRVQTEEEKKIKAKEKKETVLQKQKRRKSDAGTQTEWKSQLNQITRKRRLCPLASVEESNEFHLLKAPCSYTLTEMFDDRINNCGVDEIEEEEEDNMEKNYGNNATLPFGTENRRLIRTTSYQQMHLQQGIDEQQEFRRPSATWTNAPSQNQSQSHGQQQTQNWPQPQQQQCWPTNSASTSKGIPAILPPTTQIQGLFLNEPSSSSQQQYFQGARQYGDSQWTVPPSSSMQMQSNFTPIYLPYSSSISPHFASNIPTQIHYSQSAAQYFPQQFAPSFYPPEPQSQQQFTYLTVNPQQQFFNDNNTNNN

SEQ ID NO: 33342 - protein, 873 aa, Glycine max
  unsure (1)..(873): unsure at all Xaa locations
  Clone ID: TF_GmC716_1.pep
MAEPLSNTELSSSKTLDPTNGHDSTSEPHQTAPEDAQLNREDDVVPTAKRKRDDDVEDRSLHPLWKTSLCSYFRSHNGSCSHGGACRYAHGEEELRPRPDNTWDPTSERAKKALKTESDEKRAVSEEVMMTEAVVDDGDDGCGANHALNICLVHLPRKWSSENLRTFLCEQGIPFKHAKKKKGMMIGFEIPFEDXKQLKSSTMELEGKSIGNKTVKVANVLPGSFEKKSNAIVNMSSAGLARHRAKSMPISEAFHPVKAMAVDLFPHTPHCELVMLLERFQILKKLTRNARKACPNGVSLPEWILKSREIGGLPCKLEGIIASPIVNGYRNKCEFSVGYSLEGKVTVGFMLGNFREGVTAVEEAVDCPNVSTVACKYATIFQEFLQDSDLPVWNRFKNTGFWRQLTVREGRTNGNVVDAETFSGVAEVMLIVSTASFDDAKVAAEFKRLAQAFVAGATSHCPILPLTALVVQDHQGISNVAPADAPLHSLPIPKAAGDPEVDENNNAKDVRIHDHINNLQFSISPTAFFQVNTLAAEKLYSLAGDWSCLGPDTLLFDICCGTGTIGLTLAHRVGXIGIEMNASAVSDAHRNAEINGIKNIKFICSKAEDVMGSLLREHLNVTKEQVDDPNISGKGNDSPEDSACPEPENGELASHCPENNNAEVGSEVQKGSTCEQADGISEQAEDVMGSLLRDDANMPKEQSDYPNISGSGNDIPEDSTFPVPENGETTSHSESNNAEVGGEVQKGSTSKNGKTSLQQFKNVVAIVDPPRAGLHPTVIKALRTHPGLRRLVYISCNPETLVANAIELCTPSPVKIEKGNKDNRGWRNMSSAGLARHRAKSMPISEAFHPVKAMAVDLFPHTPHCELVMLLER

SEQ ID NO: 33343 - protein, 64 aa, Glycine max
  Clone ID: TF_GmC706754_1.pep
HFAHGIGKLRPVIRHPRYKTEVCRMVLAGVVCPYGHRCHFRHALTEQEKAVVSQPKPRSMKLER

SEQ ID NO: 33344 - protein, 558 aa, Glycine max
  Clone ID: TF_GmC119109_1.pep
MAPRILLCGDVLGRLNQLFKRVSSVNKSAGPFDALLCVGQFFPDSPEQLEDFTKYIEGGSHFPLPTYFIGDYGVAAPKLLLQASKDSANQGFKMDGFKVCHNLYWLKGSGKFPLFGLSVAYLSGRKSSSGQQFGNYTEDDVDALRAIAEEPGVVDLFLTNEWPNGVTNRAADSDIPAGLSDGSDSTVSELVQEIKPRYHIAGTKGIYYAREPYSNVDAVHVTRFIGLASVGNRDKQKFIHAISPTPASTMSSTEIAMKTTNTTLSPYTFKEKRTSPMDSAKRSSDSISDPQYWRYDVAQKRQKHEAGHGDKLCFKFVSSGSCPRGEKCNFQHDTDAREQCMRGVCFDFLNKGKCERGPDCNFKHSLQDEGNRLPSRRPGSGRSKECWFCLSSPNVESHLIISIGENYYLALAKGPLVEDHVLIIPVEHMPSTLSMSSESEIELSRFQNSLKSYCKSQEKEVIFFEWVSVRGTHANIQAIPIPSSKAIMAEKIFNLAAQKLGFEFVTKKFDSISEGRKFLKAQIDGDSSLFYAQIPRGTILLHHVEEKEKIPCQFGREV

SEQ ID NO: 33345 - protein, 111 aa, Glycine max
  Clone ID: TF_GmC69531_1.pep
MSFSDHIPSFMMSPPSFSTDTDAIEVRLQFPTNNESLEPHSPQDQPPSFKRARTCDSSLSNAMACPPRMIQHPALNKGTSHIFFKTRICAKFRAGACRNGENCNFAHGLED

SEQ ID NO: 33346 - protein, 72 aa, Glycine max
  Clone ID: TF_uC-gmroLIB3258047g05a1.pep
TCPYGDHSQFAHGIGELRPVIRHPRYKTKVCKMVLAGVVCPYGHKCHFRHALTEQEKAVVSQPKPRSIKLER

SEQ ID NO: 33347 - protein, 127 aa, Glycine max
  Clone ID: TF_GmC1146_1.pep
MPVKKYYCDYCDKLFQDTPADRKRHVQGIQHHQAKARWYDSFKQQQIPPIPNRPLCFHFVNTGFCRYGDSCKYLHPVPNNNVQQPPIVTTPSPSPGSVVGVSFGNLPPSLQPPPDGVYLHLPFLDWG

SEQ ID NO: 33348 - protein, 124 aa, Glycine max
  Clone ID: TF_GmC1146_2.pep
RSITCDYCDKLFQDTPADRKRHVQGIQHHQAKARWYDSFKQQQIPPIPNRPLCFHFVNTGFCRYGDSCKYLHPVPNNNVQQPPIVTTPSPSPAARGGKWSLWTYSSKALLVFVNILSFSSLFLS

SEQ ID NO: 33349 - protein, 126 aa, Glycine max
  Clone ID: TF_GmC31054_2.pep
SCLQFQWRRQEIEACTSGCPFGEGCHFLHYVPGGFKAVSQLINVGSNPVTPQVGRNPVPPSFPDGSSPPVVKTRLCNKFNTAEGCKFGDKCHFAHGEWELGRPTAPSYEDPRVLGQMPSSRVGGRV

SEQ ID NO: 33350 - protein, 100 aa, Glycine max
  unsure (1)..(100): unsure at all Xaa locations
  Clone ID: TF_18691395.pep
AGLGGFSWPCAVFFGASGCAFGVGCPFLCCVGGGFSGVSQLVGGGGDPVIGHVGXCPVFFSFRGGSSAAVVKSRLCIEFHAGGGCKFGGSCSFAHGEWVL

SEQ ID NO: 33351 - protein, 184 aa, Glycine max
  Clone ID: TF_LIB4392-022-R1-K1-A7.pep
VVRDDLVVVDEDDDDGVAVRDDLVVVDEDDDDDGVVRNDVVVVVDVDGWNGSDEGCDWIENENVNESVFDKVGVEYKDERSSGKAQQYPLRPEAEDCAFYLKTGTCKFGFNCKFNHPLRRKNLAKNENAGEREEQEERSGQTECKYYLRSGGCKFGKACKFNHTRGKSSSASSTAELNFLGLPI

SEQ ID NO: 33352 - protein, 354 aa, Glycine max
  unsure (1)..(354): unsure at all Xaa locations
  Clone ID: TF_GmC1136_3.pep
EGVKGERSSGRAQQYPLRPEAEDCAFYLKTGTCKFGFNCKFNHPLRRKNQAKKENAGEREEQAERSGQMECKYYLRSGGCKFGKACKFNHTRGKSSSASATELNFLGLPIRVGEKECLYXRTGSCKFGANCRFNHPDPTTVGGGDSPSGYGNGSSISLQGVSQSSISSWSSTRPLNESAPFVPVILSPNPGVSPQSSEWNGYQAPVYLSERSLHPPSTYVMNNPAMESNVYMHHQKQMQVEEFPERPGEPECSYFLKTGDCKFKSNCKFHHPKNRIARLPPCNLSDKGLPLRPEQTVCTYYRRYGICKFGPACKFDHPPPSTMAGLDQQSSYTNSAGVDVAENGDADDGNQQSV

SEQ ID NO: 33353 - protein, 146 aa, Glycine max
  unsure (1)..(146): unsure at all Xaa locations
  Clone ID: TF_uC-gmroLIB3259P212a05a1.pep
DPNIRTIELEAFFVHIKRASNMVKHFSXPVSMFAPPKSTPGVPGAPAPPASKFKTQLCQNFPQGSCSFAERXPFAHGAVEKRKSGVGVCFSICISQGMVIMINIAVEGVRGYYMALRLSMDVRVMQYLGNVPKFFWAKAEKKKKKK

SEQ ID NO: 33354 - protein, 97 aa, Glycine max
  Clone ID: TF_GmC766_3.pep
MRDICRNFQRGSCQYGERCRYLHVQQQRKPNVNGFGGQSSSYQQQNTNPFGFGSGSQQQQQQKGNPFGFGKQNSSQLNGGPHSEHKPNQYKPFENKW

SEQ ID NO: 33355 - protein, 163 aa, Glycine max
  Clone ID: TF_jC-gmXLIB3563P064bf02d1.pep
NGRYFAGKQVSCQFVNLTRWKVAICGEYMKSGFKTCSHGTTCNFIHCFRNPGGDYEWADSDKPPPKFWVKKMIALFGYSDDYETSMEQGNMSLSKTDSDRTCHSRRRSRSREMDQLNCGHSGRRKQRDERKHRTPNEDWNGSFKRKSRGRTPDSGAVSDREWL

SEQ ID NO: 33356 - protein, 162 aa, Glycine max
  Clone ID: TF_LIB4164-024-Q1-K1-A7.pep
MLWQYYQRSGGCKFGKSCKYNHTRGKISTAPAPLLELNFLGLPIRPGERECPYYMRTGSCKFGANCKFNHPDPTAVGGGGGNPPSGYGNGGSISLQGVSQTSVPSWSSPRTLNEASPFVPMMLSPTQGVSTQSSDWNGYQVNRVNANNHIWQGTIYYIISTR

SEQ ID NO: 33357 - protein, 333 aa, Glycine max
  unsure (1)..(333): unsure at all Xaa locations
  Clone ID: TF_GmC1136_1.pep
EGRNSGGTQHYPLRPEAEDCAFYMKTGNCKFGFNCKFNHPIRRKTQAVKEKAGEREETTERSGMTECKYYQRSGGCKFGKSCKYNHTRGKISTAPXSAPLLELNFLGLPIRXGERDYYMSFSIQSVSLLICSLNWSXSTRTLNVLKTFGCAIDAFLSTSRYVYTGXISDWRIPQSGHLSIYLRGAFIPPSTSVMNNPAIDTNVYMHHQKQMPVDEFPERPGEPECSCFLKTGDCKFKSNCKFHHPKNRVTRLPPCNLSDKGLPLRPDQSVCSHYSRYGICKFGPACKFDHPINLQPVMIPGLEQQSYSNSASAGVAGIGGSTGVTDATIQQSV

SEQ ID NO: 33358 - protein, 139 aa, Glycine max
  Clone ID: TF_LIB3242-241-Q1-J1-A6.pep
SWRARRLSLSRSLVLNRLRPVASGGGKAQPGSPWWRSKGYRCIGGVLYKVSANKLSKTFGHPSDAGSRPLLRTGRLDPACSCSRSLASRAVQRSLAIIRQARQRTEKRKEYCMYYNRFGRCNRGERCPYMHDPEKVAVC

SEQ ID NO: 33359 - protein, 99 aa, Glycine max
  Clone ID: TF_GmC74310_4.pep
MDLYGRSPARNGPNPVNQPEWSSPGTDTALEESMWHLTLGGGESYPERSGVPNCVYYMRTGVCGYGGRCRYNHPRDRAAVAAAVRATGDYPERVGEPPC

SEQ ID NO: 33360 - protein, 233 aa, Glycine max
  Clone ID: TF_GmC568_1.pep
MIPNVQIPTWDADGGGALSPSISSNADTCSLFSSDHFRMFQFKVRNCPRGRSHDWTECPYAHPAEKARRRDPRKYHYSGTSCPDYRKGNCKRGDTCQFAHGVFECWLHPSRYRTQLCKDGTNCRRRVCFFAHTSDQLRVVTDSSSSSFVSSPTSVLINSSFSDSSPYSFVRGIVKLDEEGSYSGLTRCVFGSPRGGFMSVNGCEEEPAMERVESGRDIRARIYAKLSRENSIG

SEQ ID NO: 33361 - protein, 143 aa, Glycine max
  Clone ID: TF_GmC568_3.pep
MIPNVQIPTWDADGGGALSPSISSNADTCSLFSSDHFRMFQFKVRNCPRGRSHDWTECPYAHPAEKARRRDPRKYHYSGTSCPDYRKGNCKRGDTCQFAHGVFECWLHPSRYRTQLCKDRTNCRRRVCFFAHTSDQLRVVTDS

SEQ ID NO: 33362 - protein, 63 aa, Glycine max
  Clone ID: TF_GmC1146_3.pep
MPVKKYYCDYCDKLFQDTPADRKRHVQGIQHHQAKARWDFAATATLANISIPFPTTMSSSRQS

SEQ ID NO: 33363 - protein, 414 aa, Glycine max
  Clone ID: TF_GmC286_1.pep
MPENRQVLRNADSSDNIEAIRRLKINDNWDRDAAAQSTQYPDRPGEPECLYYLRTGACGYGSNCRYHHPAHISIGTHYGEELPQRAGQPDCEYFLKTGMCKYGSTCKYHHPKDRRGAAPVSFNTLGLPMRQEEKSCPYYMRTGSCKFGVACKFHHPQHASLGAYPLAGSPTPTSTIIPTSGLPYAGGFPAWSAVPRMSYLSGQGLQSYVPPFLSSSQGVIPVQSWNNYMGNMNPAMPNGFLGSNLVYDYMNLGESLFGGQAINSALPNRPDQPECRYFMSTGTCKYGSDCKFHHPKERMSQSLINPLGLPVRPGQAVCSYYRIYGMCKFGPTCKFDHPVLTIPQNYGLTSPAMNVLDTPLTRGLSNVQPPETSPSKLSDKKLQHSDAKAATEDSSKQDDTTLNSFPASAEPLHN

SEQ ID NO: 33364 - protein, 484 aa, Glycine max
  Clone ID: TF_GmC1128_1.pep
MERYGRASEGSQSDPSPEWTVAADADAGLEESSWQLGLPGAESYPMRPDEADCIYYLRTGFCGYGTRCRFNHPRDRAAVIGAAPRTGGEFPERVGQPVCQYYMRTGSCKFGASCKYHHPRQVPGTATPVPLNYYGYPLRVGQKECSYYVKTGQCKFGATCKFHHPQPAGVQVLAPSPVPPVSPLPVPVPSPMYPTVHPPSGPSQQQYGVLVARPPMLPGSVVQGPYGPMVVSPTMVPFSGWSPYQAPATNPLLPSSTTSNVGSTQLYGITQLPSSAATYTGPYQPSGSSIGPSGASQKEHPFPERPDQPECHHYMKTGDCKFGPLCRYHHPPDKSAPKANVTLSPVGLPLRPGAPPCTHYTQRGVCKFGSACKFDHPMGSLSYSPSASSLADMPVAPYPVGSSIGTLALSSLSSELRPELGAGSNKESVASRMSSMSTSTGSVGLTLSSVGPISHSSTQPSAQSSSSPETTSATTSSTVSHTSS

SEQ ID NO: 33365 - protein, 65 aa, Glycine max
  unsure (1)..(65): unsure at all Xaa locations
  Clone ID: TF_10236743.pep
YKTEMCKNWELRGACKFGDKCCFAHGRHELKGKALTHVKYKTKRCXQYHHSGYCPYGLRCQYLHK

SEQ ID NO: 33366 - protein, 295 aa, Glycine max
  Clone ID: TF_GmC16887_2.pep
MDVRKRGRPDVNLNGAVKKTKQELESLSSGVGSKSKPCTKFFSTAGCPFGEGCHFLHYVPGGYNVVAHMMNLKPAAPPPRTVAAPPPIPNGSAPSAVKTRICNKFNTAEGCKFGDKCHFAHGEWELGKPIAPSIDDHHHHRPLGPPAGGRMAGRIEPPPAMAGSFGAISTAKISVEASLAGAIIGKGGVNSKQICRQTGAKLSIREHESDPNLRNIELEGTFEQIKEASNMVKDLLLTVSMSAPPKSTPGVPGAPAPPGSNFKTKLCENFAKGSCTFGERCHFAHGAAELRKSGV

SEQ ID NO: 33367 - protein, 187 aa, Glycine max
  Clone ID: TF_GmC286_2.pep
MGNMNLAMPNGFLGSNLVYDYMNLGEPLFGGQAINSALPNRPDQPECRYFMSTGTCKYGSDCKFHHPKERISQSLINPLGLPVRPGQAVCSYYRIYGMCKFGPTCKFDHPVLTIPQNYGLTSPAMNVLDTPLTRGLSNVQPPETSPSKLSSDNKLQHSDAKAATEDSSKQDDTTSNSFPASAEPLHD

SEQ ID NO: 33368 - protein, 205 aa, Glycine max
  Clone ID: TF_GmC859_1.pep
VAQRSYKGRHCKKFYTEEGCPYGDSCTFLHDEQSKNRESVAISLGPGGYGGGGGGGGGVGGGASGGNGGANAAGNGPNSKPSNWKTRICNKWEMTGYCPFGNKCHFAHGATELHRYGSGLIEGENFDAASAVAGDTNKGVPSKASADNVVAAVTLVAHSDVYHIGVPSQRPSSMVIQRPGQRAHQKWKGPDKISRIYGDWIDDIE

SEQ ID NO: 33369 - protein, 297 aa, Glycine max
  Clone ID: TF_GmC1810_2.pep
MAEHLASIFGTEKDRVNCPFYFKIGACRHGDRCSRLHTKPSISPTILLSNMYQRPDMITPGVDAHGHPIDPRKIQDHFEEFYEDLFDELSKYGDIESLNVCDNLADHMVGNVYVQFREEEHAANAVRNLTGRFYAGRPIIVDFSPVTDFREATCRQYEENTCNRGGYCNFMHLKRISRELRRQLFGKSHGRHSRSRSRSPYRHRSHEERSHRSHSRKYDDRDHHHESRSRRHRSTSPRHRRGRSRSRSPGGRRHHSPVRDGSEEAIEHGQGMNEQFQLFDRGFCFQCLINFSSWNMK

SEQ ID NO: 33370 - protein, 268 aa, Glycine max
  Clone ID: TF_GmC1700_1.pep
MAEHLASIFGTEKDRVNCPFYFKIGACRHGDRCSRLHNRPSISPTLLLSNMYQRPDMITPGVDPQGQTLDPRKIQQHFEDFYEDIFTELAKFGEIESLNVCDNLADHMIGNVYVQFREEDQAAKALHALRGRFYNARPIIADFSPVTDFREATCRQFEENSCNRGGYCNFMHVKLIGRDLRRRLFGRNHRGGSGTYHRVSRSRSRSRSASPRYRRERRESDSRGGRRSRERDGSGGRRRQHGSPPAREGSEERRARIEQWNREREENK

SEQ ID NO: 33371 - protein, 182 aa, Glycine max
  Clone ID: TF_LIB4390-016-R1-K1-H3.pep
MAEHLVLIFGTEKDRVNCPFYFKIGACRHGDRCSRLHNRPSISPTLLLSNMYQRPDMITPGVDPQGQPLDPRKIQQHFEDFYEDIFTELAKFGDIESLNVCDNLADHMIGNVYVQFREEDQAAKALHALHGRFYNARPIIADFSPVTDFREATCRQFEENSCNRGGYCNFMHVKLIGRDLRR

SEQ ID NO: 33372 - protein, 248 aa, Glycine max
  Clone ID: TF_GmC1810_3.pep
MAEHLASIFGTEKDRVNCPFYFKIGACRHGDRCSRLHTKPTISPTLVLSNMYQRPDMNMNIITNPDQPQPQSLDPDKVQDHFDDFYEDLFEELSKYGPIQSLNICDNLADHMVGNVYVQFREEDHAANALMNLTGRFYSGRPIIVDFSPVTDFREATCRQYEENVCNRGGYCNFMHLKKISRDLRRKLFGRNRRWNGRSGSRSKSPPRNRNHGEHLHSGRGSGRRDFDRSHGHHGRRPRSRSPRYRGK

SEQ ID NO: 33373 - protein, 314 aa, Glycine max
  Clone ID: TF_GmC1810_5.pep
MAEHLASIFGTEKDRVNCPFYFKIGACRHGDRCSRLHTKPTISPTLVLSNMYQRPDMNMNIITNPDQPQPQSLDPDKVQDHFDDFYEDLFEELSKYGPIQSLNICDNLADHMVGNVYVQFREEDHAANALMNLTGRFYSGRPIIVDFSPVTDFREATCRQYEENVCNRGGYCNFMHLKKISRDLRRKLFGRNRRWNGRSGSRSRSPPRNRNHGENSHSGRGSGRRDFDRSHGPHGRRPRSRSPRYRGKRSRSPVGRDRSPPIRESSAERRAKIEQWNREKEQGDTGNMNNSKSSDDYQEQSVAQNGSESGNHQI

SEQ ID NO: 33374 - protein, 151 aa, Glycine max
  Clone ID: TF_GmC1810_1.pep
MAEHLASIFGTEKDRVNCPFYFKIGACRHGDRCSRLHTKPTISPTLVLSNMYQRPDMNMNIITNPDQPQPQSLDPDKVQDHFDDFYEDLFEELSKYGPIQSLNICDNLADHMVGNVYVQFREEVHAFSALMNLTWDSLIFGRHIIAVQLYR

SEQ ID NO: 33375 - protein, 203 aa, Glycine max
  unsure (1)..(203): unsure at all Xaa locations
  Clone ID: TF_LIB4392-021-R1-K1-A7.pep
MAEHLASIFGTEKDRVNCPFYFKIGACRHGDRCSRLHTKPTISPTLVLSNMYQMFYMNMNIITNPDQPQPQSLDPDKVQDHFDDFYEDLFEELSKYGPIQSLNICDNLADHMVGNVYVQFREEDHAANALMNLTGRFYXRQYEENVCNRGGYCNFMHLKKISRDLRRKLFGRNRRWNGRSGSRKQSPRESYHGGAFTFWSWFW

SEQ ID NO: 33376 - protein, 497 aa, Glycine max
  Clone ID: TF_GmC1557_1.pep
MEQYGRSSEGSRSDPSPEWAEPEAQTGLEEPVWQLGMGGGAGEESYPQRPDEVDCTYYLRTGFCGFGSRCRFNHPRDRAVVAGAERTAGEHPERVGQPVCQYFMRTRTCKFGSSCKYHHPRQAGAGGAAATPVSLNYYGYPLRQGEKECSYYVKTGQCKFGATCKFHHPVPAGIQIPPSPFAPVSPLPVPVPSPLYSTMQPPPGPSSQQIGVLVARPPMLPGSLVQSPYGPVVLSPAMVPISGWGPYQASASGAVLPSGTPSNVGSAQLYGITQLPSPAAAYPGPYPPSGSPVGPPSSSQKEQAFPERSNQPEYQYYLKTGEVKFGPSYRYNPPPDMSVPDMSTPKANVILSPAGLPLRPGLKLKSGAPACTHYAQHGVCKFGSACKFDHPMGSMSYSPSASSLADMPVAPYPVGSTIATLAPSSSSSELRPEPSSGSSKESVPSRMPSSTLTGSIGSTLSTGGPISQSSTQPPSQSSGPLAAVTSTTSSNVSHTSS

SEQ ID NO: 33377 - protein, 422 aa, Glycine max
  Clone ID: TF_GmC825_1.pep
VWENNNNNHNLIVPNPQDSLWMMNLRTGETMDSGSYPERPGEPDCSYYMRTGLCRFGATCRFNHPPNRKLAIATARMIGEFPERIGQPECQYYLKTGTCKFGATCKFHHPKDQAGIAGRVALNILGYPLRPNEPECTYYLRTGQCKFGNTCKFHHPQPSNMMLSLRSSPVYPTVHSPTTLGQQSYAGGTYIPSPRWQGPSSYAPLILPQGVVSVPGWSAYSGQMGSISTSDSPQQAMRNGQTYGTSRQGELAGSQGAYSQFRSGTVPVGFYTLQRENIFPERPGQPECQFYMKTGDCKFGAVCRFHHPQERLVPAPNCVLSPIGLPLRPGEPLCVFYSRYGICKFGPSCKFDHPMEIFSHNISASPSADAPSRHLLGSSSGTAALNLSSEGLVESSSAKPRRLSLSETRQIPSGDDDIDDDG

SEQ ID NO: 33378 - protein, 471 aa, Glycine max
  Clone ID: TF_GmC74310_1.pep
MDLYGRGQARNGSNPVNQPECRSPGTDTGLEESIWHLTLGSGESYPERPGVPNCVYYMRTGVCGYGSRCRFNHPRDRAAVAAAVRATGDYPERVGEPPCQYYLKTGTCKFGASCKFHHPKNGGGYLSQAPLNIYGYPLRLGEKECSYYLKTGQCKFGISCKFHHPQPAGTSLPTSAPQFYQQVQSPTVPLPEQYGGASTSLRVARPPVLPGSYVQGAYGPVLLSPGVVQFPGWSHYSAPVSPVLSPGAQPAVGATSLYGVTQLSSPTSAFARPYTPLSSTTDPSGSNPKDQFFPERPGEPECQYYLRTGDCKFGLACRYHHPRDHIVARPLLSPVGLPLRPGLQPCAFYLQNGHCKFGSTCKFDHPLGSMRYSPSASSLIDVPVTPYPVGSLLSQLAPSTTSSDLRPELMSGSKKESFSARIPSSGNSSGTSVGLIFSQGGSVSLFDVQLSSQSNAPPNSSRSTRQSGEIR

SEQ ID NO: 33379 - protein, 210 aa, Glycine max
  Clone ID: TF_GmC122_2.pep
ISCKYGVTCRYNHPDRNGMYNILILIVLTFSCFLNNYFALSFFDAAINPPIAGLGASIFPSSAANLNIGLLNPAVSVYQAFEPRLSNPMSQVGIADTIYPQRPGQIECDFYMKTGECKFGERCKYHHPIDRSAPSLSKQATVKLTPAGLPRREGAVICPYYLKTGTCKFGATCKFDHPPPGEVMEMAKSQGTSANGGEAEGDEIETSAQL

SEQ ID NO: 33380 - protein, 209 aa, Glycine max
  Clone ID: TF_GmC86_1.pep
MANYLASIFGTEQDKVNCSFYYKIGACRHGDRCSRKHVKPSYSQTILLPNLYQNPAYDPKNKMNPQQMQMHFDAFYEDIWCELCQYGLAEELVVCDNNNDHLIGNVYVRFKYEEDAQKACDALNSRWYAGRPIYCELSPVTDFREACCRLNSGEGCVRGGFCNFIHRKEPTAELDRELDMCTRKWLKERGRDARSMSRSPTPPATKNRF

SEQ ID NO: 33381 - protein, 610 aa, Glycine max
  Clone ID: TF_GmC122_1.pep
MENHIYASSYSPSTNYRSFRDPPADTMFLSHHLHHHRTDASSAAALRFPSSALSAVEAADIAPPGVTSRIASSSAAADDENFLSTWPPAAAAAPFALDLKRSSEALYHPTILGTIGQSEAWYSTNPLAKRPRYESASNMTIYPQRPGEKDCAHYMLTRTCKFGDSCKFDHPFWVPEGGIPDWKEVPIVTSETPPERPGEPDCPYFLKTQRCKFGSKCKFNHPKVSSENADVSSGLPERPSEPPCAFYMKTGKCRYGAACKFHHPKGDSCKFDHPVWVPEGGIPDWKEAPNVVTSETPPARPGEPDCPYFLKTQRCKFGSKCKFNHPKVSSENADVSSGLPERPSEPPCAFYMKTGKCRYGTACKFHHPKDIQIQLSDDLSQNVAQTQTNSMMGGATGDTQPIKSLISPSLQNSKGLPVRLGEVDYHPYMKTGTCKYGVSCRYNHPDRNAINPPIAGLGASILPSSAANLNIGLLNPAVSAYQAFEPRLSNPMVGIAETIYPQRPGQIECDFYMKTGECKFGERCKYHHPIDRSALSLSKQATVKLTPAGLPRREGDVICPYYLKTGTCKFGATCKFDHPPPGEVMEMAKSQGTSANGEEAEGDTSALEQL

SEQ ID NO: 33382 - protein, 296 aa, Glycine max
  unsure (1)..(296): unsure at all Xaa locations
  Clone ID: TF_GmC16887_1.pep
MDTRKRGRPEPGFSLNGGFKKSKQEMESLSTGVGSKSKPCTKFFSTAGCPFGEGCHFLHYVPGGYNAVAHMMNLTPAAPPASRNVAALPPVPNGSAPPAVKTRICNKFNTAXEGCKFGDKCHFAHGEWELGKHIAPSFDDHRTMGPTGVGRLAGRMEPPPGPAASFGANATAKISVEASLAGAIIGKGGVNSKQICRQTGAKLSIREHESDPNLRNIELEGSFEQIKEASNMVKDLLLTLQMSAPPKTTPGVPGAPASHGSNFKTKLCENFTKGSCTFGDRCHFAHGAAELRKSGV

SEQ ID NO: 33383 - protein, 316 aa, Glycine max
  Clone ID: TF_GmC1136_2.pep
DDGWNGGGDEGCDCIENVNVNESESDKVGGDVEGVKGDRSSSRAQQFPLRPEAEDCAFYLKTGTCKFGFNCKFNHPLLALASAHVIGALSFPRTNRQAKKESAPINGGSCKFGANCKFNHPDPTAVGGGGGNPPSGYGNGGSISLQGVSQTSVPSWSSPRTLNEASPFVPMMLSPTQGVSTQSSDWNGYQASVYLPERSIHPPSTFVMNNPAIDTNVYMHHQKQMPVDEFPERPGEPECSFFLKTGDCKFKSNCKFHHPKNRVTRLPPCNLSDKGLPLRPDQSVCSHYSRYGICKFGPACKFDHPDKLAARDDSWT

SEQ ID NO: 33384 - protein, 297 aa, Glycine max
  Clone ID: TF_GmC31054_1.pep
MDRKRGRPEAAFNFNGGAKKSRPETDSFPTGLGSKSKPCTKFFSTSGCPFGEGCHFLHYVPGGFKAVSQLINVGSNPVTPQVGRNPVPPSFPDGSSPPVVKTRLCNKFNTAEGCKFGDKCHFAHGEWELGRPTAPSYEDPRVLGQMPSSRVGGRVEPPHPAHGAAASFGASATAKISINASLAGAVIGKNGVNSKQICRVTGAKLSIRDHDTDPNLRNIELEGSFDQIKQASAMVHEVILNVSSASGPPMKSFTSQTSAPTSNFKTKLCENFAKGSCTFGERCHFAHGNDELRKSGM

SEQ ID NO: 33385 - protein, 187 aa, Glycine max
  Clone ID: TF_GmC16887_3.pep
FNTAEGCKFGDKCHFAHGEWELGKHIAPSFDDHHAMGPPGAGRLAGRMEPPGPAASFGANSTAKISVEASLAGAIIGKGGVNSKQICRQTGAKLSIREHESDPNLRNIELEGSFEQIKEASNMVKDLLLTLQMSAPPKTTPGVPGAPASHGSNFKTKLCENFAKGSCTFGDRCHFAHGASELRKSGV

SEQ ID NO: 33386 - protein, 150 aa, Glycine max
  Clone ID: TF_GmC104291_2.pep
MEGTATGCYKCGRPGHWSRDCPFSAPNSNPNPNPNPNPNPATTPNPNTPNPSSSSFKPRFAAEKPKKLPRTKPKLTPELLLSDEGLGYVLRYFPREFKYRGGGHEVRDLGNLLRLYTEWHSRLLPYYSFNQFVHKVEKVAATRRVKTCLR

SEQ ID NO: 33387 - protein, 173 aa, Glycine max
  unsure (1)..(173): unsure at all Xaa locations
  Clone ID: TF_GmC18165_1.pep
MSRVYVGNLDPRVSERDLEDEFRIYGVLRSVWVARRPPGYAFIEFDDRRDALDAIQALDGKNGWRVELSHNSKGGGRGGRGRGGEDTKCYECGEPGHFARECRLRIGSRGLGSGRRRSPSPYRRRTSPSYGXSYSPRGRRSPRRRSISPPWGRNYSRSPSYRPLRDFPYANAD

SEQ ID NO: 33388 - protein, 134 aa, Glycine max
  Clone ID: TF_GmC18165_2.pep
GFSVWVARRPPGYAFIEFDDRRDALDAIQALDGKNGWRVELSHNSKGGGRGGRGRGGEGTKCYECGEPGHFARECRLRIGSRGLGSGRRRSPSPYRRRRSPSYGYDRRSYSPRGRRSPRRRSISLPRGRSYSRM

SEQ ID NO: 33389 - protein, 177 aa, Glycine max
  Clone ID: TF_GmC18165_3.pep
MSRVYVGNLDPRVSERDLEDEFRIYGVLRSVWVARRPPGYAFIEFDDRRDALDAIQPVDGKNGWRVELSHNSKGGGRGGRGRGGEDTKCYECGEPGHFARECRLRIGSRGLGSGRRRSPSPYRRRRSPSYGYDRRSYSPRGRRSPRRRSISLPRGRSYSRSPPYRPSRHDSPYANAM

SEQ ID NO: 33390 - protein, 222 aa, Glycine max
  unsure (1)..(222): unsure at all Xaa locations
  Clone ID: TF_GmC629454_1.pep
RNLPGFNPNTRHCLYGLDADLIMLSLATHEVHFSILREVVTFPGQQEKCFLCGQPGHFAADCRGKPGEKAEDWNPPEXNTPFHKKKYXQFLNIWVLREYLQFELEIPNPPFEIDFERVVDDFVFLCFFVGNDFLPHMPTXEIREGALNLLMHIYRKEFTAMGGYLTDAGEVFLERVQHFIQSVAVHEDQIFQKRVRIQQATEINEEMKARARGDMPGEHVLS

SEQ ID NO: 33391 - protein, 464 aa, Glycine max
  Clone ID: TF_GmC5288_3.pep
MMKSSDAANEKLLENGTSSSQIKKGGLRTMPFIIVNECLEKVASYGIMPNMILYLRDDYLMPIAKGTSVIYTWTAASDVLSLFGAFLSDSYLGRFLVIAIGSFSSLLEHEMELLRLHQNEENDKKKKGIALKASSSIQEESDQDNDADDDDDLSFFVKRFNKFLKVRGNQRRPNFKSKRRTKNSSSTLKCFECNQPGHLRVDCPIFKKKMEKSEKKNHSEKKLKKAYITWDENDLESSDDSENEEINLCLMAKSYESDEEVTSSNNLSISFDELQDAFADLHKESIKLAKLVSSSKKTISNLENEISKLNKELDLLRNEVSISKTNEKVNISTISDKKISDSCSCCDKYVKEIKELKNSLAKFSYSKNNLDVILSKQRYVSNKNGLGYKSEKQQKFHKNFSTSTQKCNSNSITCFYCGRRGHGISTCYFKKNYSNIKMIWVPKGSSVYTNMQGPNKVWVPKSKT

SEQ ID NO: 33392 - protein, 55 aa, Glycine max
  unsure (1)..(55): unsure at all Xaa locations
  Clone ID: TF_LIB4392-013-R1-K1-A12.pep
IHXDFSQSVATLWSQYRRKDQKGKGGGCFKCGSTDHIAKDCTGEAMKQPQQIHLK

SEQ ID NO: 33393 - protein, 109 aa, Glycine max
  Clone ID: TF_GmC10165_2.pep
DFYGKFSDRDRSNPRGSRDQRGFRSSRGREGGQDSNDEFGRGGRSFRSGNNRSRTTGKSSGNDWLIGGSSRSSRFSSSNRDGGHGGACFNCGKPGHRASDCITQKRVFF

SEQ ID NO: 33394 - protein, 385 aa, Glycine max
  Clone ID: TF_GmC137024_1.pep
RPRVRPRVRLKSKYLSTLLSATSFDADGGLFPLAFGVVDVENDDSWTWFLSELHKVLEVNTECMPEFIFLSDGLNSITDAVRRKFPSSSHAFCMRHLTESIGKEFKNSRLVHLLWKASYSTTTIAFKEKMGEIEEVSPEAAKWLQQFHPSQWALVHFKGTRFGHLSSNIEEFNKWILDTRELPIIQVIERIHSKLKTEFDDRRLKSSSWCSVLAPSAEKLMTEAIDHASTYQVRLDDEVEFEVLSADRSDIVNIGSHSCSCRDWQLNGIPCSHATAALISCRKDVYAFTQKCFTAASYRNTYAEAIHHIPGKLEWSKTDDKSSMDDNILVVRPPKLRRPPGRPEKQMCVDDLNREKHTVHCSRCNQTGHYKRTCKAEMINSIEQF

SEQ ID NO: 33395 - protein, 81 aa, Glycine max
  Clone ID: TF_LIB3049-042-Q1-E1-G10.pep
TLQGCRKNMKETAPGCYNCGKPVHWSRDCPFSAPNSNPNPNPNPNPNPATTLNPNTRNPSSSSFKPKIPGEKPKKLPRTKP

SEQ ID NO: 33396 - protein, 1380 aa, Glycine max
  Clone ID: TF_GmC988635_1.pep
MATNSHFPAIFPILDGRNYDQWSRKMKAILGYQDVWDLVQNGLIPLPENANAAQQTVYRESKKEDWKGLCILHQCVNPAIFEKIARSETSKEAWDILANSYAGDQKLKKVRLQTLRRQYELLGMEESESIAAYFTRVQTMTNQMLYCGETLSDESIVEKILRSVSSRFDHITVAIEQAKDLSTMTIEELQGSLEAHEQRMNEKKTVKPSTEQALAAQTGNKSGGNQRGRGRGRNNYRGGRGRGNYNNSNSAKVNSSENSSNNKQGNNHTENYRGRGGRGFRGRGRKFDKSYIQCYNCGRYGHFADECYSNVNGNDAKMAEEEEETEETLLMAIEEKKSSDETVQMVSIKKEGENGEYWVLDTGCSTHMTGRREWFVELDFTIKSRVRFADDRTMKVEGVGKVMIRKKDGSLCYITGVLYVPGMKSNLLSIGQLLEKGYRMVLEDKAMKVYDTEHNLLMKGILSNNRIFKIELGMLLQQCLATAVDKEEWLWHFRYGHLNFGDLNRMQSKAIVKGLPHIHVPKDVCAECMESKMSRGAFNPNVPSRSKRKLQVIFSDVCGPIQHETPAGNKYFVTFIDDFTRKLWIYLIKRKNEVLGVFKKFKVLVEKQSGQNIEILRTDGGGEYVSTEFDEYCENEGITHEVTPPYTPQHNGVAERKNRTLLNMVRSMLKSKNMPKMWWGEAVNTAAYIINRSPTKKMENITPEEAWTGVKPNVSHFRVFGSVCYRHVPDQLRTKLDDKGEVMIMVGYHSTGGYKLVNPVNNKIVISRDIVFDEGKAWKWSEKRESSTGVEQNLFDVPAGETESDIEGETGPVEDNDDEGGSPEMPRRSLRQRQVPARLNDYEIMPDGAIDDEGNLVHFALLAETEPVTLQEAMKNSKWLEAMKEELRSIEKNLTWELVELPKGKKAIGVKWVYKVKVNPKGEVVKYKARLVARGFLQRHGVDYEEVFAPVARIETVRVVVAHASMQRWKVHQLDVKSAFLNGELEEEVYVEQPAGFVKQGSEKKVLKLRKALYGLKQAPRAWNKKIDKSLINMGYVRCISEHGVYVKSGGGDIVILCLYVDDLLVTGNNETKVTEFKRKMMSTFEMTDLGEISYFLGIEFQNTSDGVLLSQKKYVSDVLKRFNMQHCNGAATPAEAGLWLDKNVDEPEVDATEFRQVVGALRYLCNTRPDIAFSVGLISRVMDRPRTSHLAAAKRILRYVKDTMAYGILLPSKCRENEKGLYGFTDADWGGDKTDRKSTAGSVFLLGSGPISWSSKKESVVALSSCEAEYIAASMGGCQAIWLDNLMQELMIKKESVVELFVDNKSAISLAKHPVAHGRSKHIETRYHFLRDQVTKGRLKLSYCRTDMQVADIFTKAVKRETFKKLRNILNVVDCNEFV

SEQ ID NO: 33397 - protein, 1342 aa, Glycine max
  Clone ID: TF_GM436D07rgnG8.C1.o10.ma.pep
MATNSHFPAIFPILDGRNYDQWSRKMKAILGYQDVWDLVQNGLIPLPENANAAQQTVYRESKKEDWKGLCILHQCVNPAIFEKIARSETSKEAWDILANSYAGDQKLKKVRLQTLRRQYELLGMEESESIAAYFTRVQTMTNQMLYCGETLSDESIVEKILRSVSSRFDHITVAIEQAKDLSTMTIEELQGSLEAHEQRMNEKKTVKPSTEQALAAQTGNKSGGNQRGRGRGRNNYRGGRGRGNYNNSNSAKVNSSENSSNNKQGNNHTENYRGRGGRGFRGRGRKFDKSYIQCYNCGRYGHFADECYSNVNGNDAKMAEEEEETEETLLMAIEEKKSSDETVQMVSIKKEGENGEYWVLDTGCSTHMTGRREWFVELDFTIKSRVRFADDRTMKVEGVGKVMIRKKDGSLCYITGVLYVPGMKSNLLSIGQLLEKGYRMVLEDKAMKVYDTEHNLLMKGILSNNRIFKIELGMLLQQCLATAVDKEEWLWHFRYGHLNFGDLNRMQSKAIVKGLPHIHVPKDVCAECMESKMSRGAFNPNVPSRSKRKLQRKNEVLGVFKKFKVLVEKQSGQNIEILRTDGGGEYVSTEFDEYCENEGITHEVTPPYTPQHNGVAERKNRTLLNMVRSMLKSKNMPKMWWGEAVNTAAYIINRSPTKKMENITPEEAWTGVKPNVSHFRVFGSVCYRHVPDQLRTKLDDKGEVMIMVGYHSTGGYKLVNPVNNKIVISRDIVFDEGKAWKWSEKRESSTGVEQNLFDVPAGETESDIEGETGPVEDNDDEGGSPEMPRRSLRQRQVPARLNDYEIMPDGAIDDEGNLVHFALLAETEPVTLQEAMKNSKWLEAMKEELRSIEKNLTWELVELPKGKKAIGVKWVYKVKVNPKGEVVKYKARLVARGFLQRHGVDYEEVFAPVARIETVRVVVAHASMQRWKVHQLDVKSAFLNGELEEEVYVEQPAGFVKQGSEKKVLKLRKALYGLKQAPRAWNKKIDKSLINMGYVRCISEHGVYVKSGGGDIVILCLYVDDLLVTGNNETKVTEFKRKMMSTFEMTDLGEISYFLGIEFQNTSDGVLLSQKKYVSDVLKRFNMQHCNGAATPAEAGLWLDKNVDEPEVDATEFRQVVGALRYLCNTRPDIAFSVGLISRVMDRPRTSHLAAAKRILRYVKDTMAYGILLPSKCRENEKGLYGFTDADWGGDKTDRKSTAGSVFLLGSGPISWSSKKESVVALSSCEAEYIAASMGGCQAIWLDNLMQELMIKKESVVELFVDNKSAISLAKHPVAHGRSKHIETRYHFLRDQVTKGRLKLSYCRTDMQVADIFTKAVKRETFKKLRNILNVVDCNEFV

SEQ ID NO: 33398 - protein, 240 aa, Glycine max
  unsure (1)..(240): unsure at all Xaa locations
  Clone ID: TF_GmC121484_1.pep
SSRIGSRKNPAFKPPADYRPPKLQKKLYIPMKEYPGYNFIGLIIGPRGNTQKRMEKETGAKIVIRGKGSVKEGRLQQKRDLKPDPSENEDLHVLVEAETPESLEAAAGMVEKLLQPVDEVLNEHKRQQLKELAALNGTIRDEEYCRLCGEPGHRQYACPTRTSTFKSEVVCKHCGDGGHPSIDCPVKGATGKKMDDEYHNFLAELGGSVPESATKQTSTLAVGAGTSXGSNPPWANNFNT

SEQ ID NO: 33399 - protein, 313 aa, Glycine max
  unsure (1)..(313): unsure at all Xaa locations
  Clone ID: TF_GmC79463_1.pep
KKQDLKTMTIKQLMGSLQAYEEKQKRKIKQKEATEQLLQLNVKEANYANYKSQRGRGRDQDRGRGRGHGGEGRGGXKNHSNKFNNGERSWNPQVTRGRGRGNSWSRYDKSQIKCFNCNKIGHYASECRFSKKVEEKANFVEEKGGEEETSLFACQNKFEEKRNKWYLDTGASNHMCGDKSMFVEINEAATGDVSFGDDSKIPVKGKGKILIRLKNGSHQFISNVYYVPNMKNNILSLGQLLEKGYDIHLKEHSLFLRDCRHNLIAKVPMSKNRMFLLNIXNDVTKCLKACYTDSSWLWHLWFGHLNEDGLEST

SEQ ID NO: 33400 - protein, 807 aa, Glycine max
  unsure (1)..(807): unsure at all Xaa locations
  Clone ID: TF_GMCosmidSEREIS.C1.o2.np.pep
MARKSMYILYNKEIATLDSDLELPSGVKSILQEFQDMFSKEMPQGLPPLRGIEHQIDLVLGAVLPNRPTCRSNPQETXEIQKXVTDLMTKGWVEESLSPCIVPIILVPKKDESWRMCSNCRAVNNITIKYMHPIPRLDDLLDELYGSCYFSKIDLKSGYNQIRIREGDEWKTAFKTKYGLYEWKVMPFGLTNAPSTFMRLMNHVLREFLGKFVVVYFDDILVYRKNLDEHLQHLKSILHVLRKQRLYANLEKCTFCKDHVVFLGFVVNSSRVHVDKEKIKAIQEWPIPKNVSEVRSFHGLASFYRRFVKDISTIVAPLNELVMKHARFKWGEEQEKTFFVLKEKLTNAPILALPNFAKSFELECDASEVVADALSRSYALLYTLEAKFLGFECIKELYEHDADFSHIYQTCYPIAFDGYFKHDGYLVKDKRLCVPKSSIKEVLIKEAHXGGLMGHFGVQKIYDILHEHFYWPHMKSDVHSLCNKCLVSKKAKSKVKPHGLYTSLPIPEHPWIDISMDFVFGLPRSKGGKDSIFVVVDRFSKMAHFISCKKVDDACHVVDLFFKEVVRLHGLPRSIVSDRDSKFLNHFWRTLWGKIGTKLLFSTTCHPQTYGKTEVVNINLSTLLRAVIKKNIKTWEECLPHVEFACNRVVHSTTQLSPFEIVYGFNPLTPLDLLPLPDXHNLKISLGXVKAEYVKKMHEKVKSQIEKKMEGYAKYANKGRKKVTFERSDWVWVHFRKEWFPSQRKSKLMPRGDGPFQVLARINDNAYKIDLPREYGVSATFNVVDLTLFDAGDDFRDLRANACQEGG

SEQ ID NO: 33401 - protein, 184 aa, Glycine max
  Clone ID: TF_GmC9855_12.pep
MSRVYVGNLDSRVTERDLEDEFRVFGVIRSVWVARRPPGYAFIDFDDRRDAQDAIRELDGKNGWRVELSHNSRGGGGGRGGRSGGSDLKCYECGEPGHFAREYRMRGGSGRRRSRSGRRFRSSPSYGRRSYSPRYGRSPCGRSPRHRSLSPRGCSYSRSPPYCGREEVPYANGNGLRELRRSRS

SEQ ID NO: 33402 - protein, 496 aa, Glycine max
  unsure (1)..(496): unsure at all Xaa locations
  Clone ID: TF_GM310N10.C12.o2.np.pep
MEEERRKIMKEMKREKHASYSSHNSCKSLSEELRDYYEGRHRSHLNWEKKVEQLFACHHISEERKVPLATLSFQGYALYWWTSLVRKQRIHGDPPVEYWNDLKSALRKRHIPSYYKSELMDKLQRLRQGSMSVEEYRQQMELLLLRSRLREEERTSIARFLSGLNMXVRDKVELLPYRDLDELVQLCIRVEQQLKRKPSSKSYGFHSYPRKDXAQQILGAASSKPKEDKGKTIEKSTPTTSSQERTSNIKCFKCLGKGHIASQCPTKKTMIMRGQDIYSSQEEKESSEEVYPHEEGDLLMVKRLLGGQSCDLSQSQRDNIFHTRCKILDKTCSHIVESGSCCNCCSTRLVSKLNLRIISHPKPYKLQWLNEQGEMIVNQQVKVPFSIGTYKDEVNCDIVPMEAGHILLGRLWKFDRKIIYDDLTNEITSPILALNXVASSNTFIGGQRSTNYEXKRDEEEKLEKQIKELLDEGLVRKSLNPCALLVCFIPLLSLTF

SEQ ID NO: 33403 - protein, 138 aa, Glycine max
  unsure (1)..(138): unsure at all Xaa locations
  Clone ID: TF_LIB3242-716-P1-K1-G2.pep
KRNCPELKKDKVSTSEFGGVAVVSEKSHGENVLYVSSNVNDDDWILDSACTFHMTPNRDWFATFQNVDGGKVLMGNDGACSIAGKGTVKIKMNDGIVRTLTHVRXMFPALKKNLISISTLDSNRCTYQAKGGALRVSK

SEQ ID NO: 33404 - protein, 482 aa, Glycine max
  unsure (1)..(482): unsure at all Xaa locations
  Clone ID: TF_GmC88487_1.pep
MGVPAFYRWLAEKYPMVIVDAIEEEAVVIDGVQIPVDTSNKNPNNIEYDNLYLDMNGIIHPCFHPEDRPSPTSFDEVFECMFDYIDRLFVMVRPXELLYMAIDGVAPRAKMNQQRSRRFRAAKDAADAAAEEARLREEFEKEGRKLPSKGESQTFDSNVITPGTEFMAVLSIALQYYVHLRLNNDPGWQNIKVILSDANVPGEGEHKIMSYIRLQRNLKGYDPNTRHCLYGLDADLIMLALATHEIHFSILREIVFTPGQDKCFLCGQMGHMAANCEGKAKRKAGEFDEKGEAIVTKKPFQFLNIWTLREYLEYEMRISNPPSEIDFDCIVDDFIFMCFFVGNDFLPHMPTLEIREGAINLLIAVYKKEFREFGGYLTNGSTINLSRVEHFIQAVGSYEDKIFQKRARLHQRQTERIKREKAQARRGDDAEPQFQPESLVAVSRFHGSRLASAPTPHHFNLLGIIILKRLHQLEKTIKNHLR

SEQ ID NO: 33405 - protein, 77 aa, Glycine max
  Clone ID: TF_GmC419_67.pep
PKYKTQKKKKSILILTKKKWIQPLIHGPKIYPKTHENPRAFSCIFGPIFLESSIQCPWGVGLHHLGGLPFLITLYLH

SEQ ID NO: 33406 - protein, 148 aa, Glycine max
  unsure (1)..(148): unsure at all Xaa locations
  Clone ID: TF_LIB3242-180-Q1-J1-B10.pep
MTNIAAKLKTLGMVVNENFHVECMLKSLLSEXGSFQMSYNTIKDKWNVHELHSMLVQEEMRLKNQGSHLVHYVSHQGNQGARKKFVKKHDKGKGPLKINNNSKQIQKKTSKRNNCHFCGKSGHFQKDCPKRKSWFEKKGIPNNPNHKP

SEQ ID NO: 33407 - protein, 168 aa, Glycine max
  Clone ID: TF_GmC115882_1.pep
NFQQICLKCGDPGHKIRNCPKEHTSQRKYNRLDVWQNNRIDKKHKSEDVNKFESDSLAKLQSNLEPLSLRHQRDGRRLSGSRHHHAPWRNESFPGARETDRHKKKEYVGKKRSRNDIELPKQSNAKISKRSVSSSLLSDYSASHFLSNSQSSKTLRRTSSHSRVDPQA

SEQ ID NO: 33408 - protein, 202 aa, Glycine max
  Clone ID: TF_GM433K20.C15.o1.fg.pep
MTSVKYEVGKFTGQNDFGLWRSKIRALLVHQGLEEALQGEITLDAKLDERDKKILMDKAHNAIILSLKDKVLRQVSKEKTTTEIWLKLEGLYMTKSLKDNHFEKKKSKPQSGNSENVPNIRCYHCKKEGHTRRFCPVRQNGCNSHTSNERGNATIVQDGYESTEALVVGSGKSDGEWIMDSRCFFHMTPNKPWFEKFTQLHG

SEQ ID NO: 33409 - protein, 447 aa, Glycine max
  unsure (1)..(447): unsure at all Xaa locations
  Clone ID: TF_GmC419_136.pep
QQLKIKPSSKSYGSHSYPRKDQAHGILGAAPSKPKEDKGKTIDKYTPKTSSQERTSNIECFKCXGXGHIASQCPIKKTMIMRGQDIYSSQEETTSCSSSSGSEDEVRGQESSEEVYPHEEGDILMVRRLLGGQSCDLSQSQRENIFHTRCKILDKTCSLIVERGSCCNCCSTRLVSKLNLTIIPHPKPYKLQWLNEQGKRIVNQQVKVPFSIGTYKDEVNYDIVPMEAGHILLGRPWQFDRKIIYNGLTNEITLTHLGTKFVLHPQTPSQVAKDQLTMKDKRDEEEKFEKQKKKKDSKALSSKARGKEKEGKDSSKKIVKKENHFATKGDIKRALLLKQSSYLLLSRETSLSNTTIPTLETLPPKVQELLHEFGDIFPKGISPGLPPLRGIEHQIDLVPGASLPNRPTYRTNPQETKEIESQVKELLEKGWVQESLSPCAVLAVVGA

SEQ ID NO: 33410 - protein, 119 aa, Glycine max
  Clone ID: TF_GmC122596_1.pep
KGKLLSLVDQRPKRNFVFKETSSKAFVVKYASEKESNDDDSNKEDNELSLITRKIKKIGKIRTPLGSIDHTKDPCTRKRKVQSSAISARNEGTSSQNVLTLKSQWIRRRNSSIPKRKAS

SEQ ID NO: 33411 - protein, 184 aa, Glycine max
  Clone ID: TF_GmC109188_1.pep
NKVVTKKIFPGRRYWHKPSISKEIETPNQKLKSKVTCYNCGKQGHISKYYRLKRKLRNLNLEPAIEEQINNLLIESSEEEETKTSSSMISDENLNLIQQDDQLSSTEDERKINTLTREQDLMFEAINSIPDPQEKKNFLEKLKKTLEVKPKQKDFITNNKFDVSNILRRLENTSAKPTTIQDLP

SEQ ID NO: 33412 - protein, 471 aa, Glycine max
  Clone ID: TF_GmC147665_1.pep
MDITLNQAPDQVQQDQATPISLQPASLMDQTILVDPATPIDLELTMKKIKKKQRKKTTSTELPEISIQTSTCLIEASPIDPAIPMDPCLAISTGPEQEMSKKKKKRKSKLESEAAELNEHYKLPEAAPPEAPVQKSIYHTDAPSIDPVGPSPPVDTETPIDQGQQMTKKKRKKKKRIVIIIEGTETNEHGVKPPETLVQKFAYPTVTTSIDPTIPVPAPPIDQGQKMRKKMRKRSALISKGAEPDEHDDKPPGTPVQRSIHPIAEPSIDPTIPASQTPPVDPATPVDPEPMTKKKRKKKRNSAKNEGLESEKHNADRIAETPVQKTEGSTTENSMGRCNVEPAGKTLVQITDTLRVTKSPFKHHGESSLRCRACRQPGHRFQQCQRLKCLSMDEEVCFFCGEIGHSLGKCDVSQAGGGRFAKCLLCYGHGHFSYNCPQNGHGIDPKVLAVNGAINRTAVEARRELLPRFNM

SEQ ID NO: 33413 - protein, 69 aa, Glycine max
  Clone ID: TF_jC-gmX3043001A11sg10F7a1.pep
FYLDLFETFVVPSFRWNFISISSLDKFEFSCSFGNNKVSLYQNSNMVGYGSFIDNLYMLDDISSYNEIL

SEQ ID NO: 33414 - protein, 192 aa, Glycine max
  unsure (1)..(192): unsure at all Xaa locations
  Clone ID: TF_LIB4203-002-R1-K1-B10.pep
GKEWEIPKYQQVLQPIVPLEGQEMQVKAKRPKPHCVNCGSEEHQMKECPMPRNAARITEKRKEYMDACGEASGQSFQQRYHAEEVEERFGRFKPXVISEELQDALGVTDKSVAPLIYRMRQVSYPPGWVKGAELENGGLGLXGGDGDAGGETGAGGNAGWGWGLRWGGGGGGCGGGGWGGLGGGVGAWRGGW

SEQ ID NO: 33415 - protein, 198 aa, Glycine max
  Clone ID: TF_GmC147156_1.pep
EKTPPASVIFCENKADVDDIHEYLLLKGVEAVAIHGGKDQEEREYAIAAFKAGKKDVLVATDVASKGLDFPDIQHVINYDMPAEIENYVHRIGRTGRCGKTGIATTFINKNQSETTLLDLKHLLQEAKQRIPPVLAELNDPMEDNEEITDISGVKGCAYCGGLGHRIRDCPKLEHQKSMAIANNRKDYFGSGGYRGEI

SEQ ID NO: 33416 - protein, 224 aa, Glycine max
  unsure (1)..(224): unsure at all Xaa locations
  Clone ID: TF_GmC80348_2.pep
MYMFKPLSSSPGLRNLEPMASMFARRFSAIKHIIPTNATDTTTQVNMLCLFCGTKGHQLSDCSAIAENKLEDLQKNIDSYGGLEEHSCLCIKCFQPNHWAISCPTSISTRKHELKANALVNDXNPTLSPSKLAERQISQVPKEIFEAVKKLQLSRTDILKDXQSQRQCSEQNTRKSLSVKVGSIKCMVESQYISNHDFLEEEIMEWWSNTSQAGAEISSEEYII

SEQ ID NO: 33417 - protein, 148 aa, Glycine max
  unsure (1)..(148): unsure at all Xaa locations
  Clone ID: TF_GmC261618_1.pep
TKIDKSILEQQEEKMHSLILLSLFDEVLYKVSKEKIAFVLWLKLXKLFMTKSICNKLLLKQHLFGLYXKEGKPLEDHLDELNSVLFXLCDIDVKLEDEDLAMILLAXSPNSYENFVNSHSVGKDCITLEEVKFSLYSRELHHIAFGKW

SEQ ID NO: 33418 - protein, 249 aa, Glycine max
  unsure (1)..(249): unsure at all Xaa locations
  Clone ID: TF_GmC9855_2.pep
MCVTDINFPILFTERKKGPYKTKRSPSRRGRSLCFFFVLNAPHEFLQRARLLGFFFLSSHCIASGSSEKMSRVYVGNLDSRVTERDLEDEFRVFGVIRSVWVARRPPGYAFIDFDDRRDAQDAIRELDGKNGWRVELSHNSRGGGGGRGWXALGGSDLKCYECGEPGHFARXECRMRGGSIRSRSRSPPRFRRSPSYGRRSYSPRGRSPRHRSLSPRGRSYSRSPPYRGREEVPYANGNGLRERRRSRS

SEQ ID NO: 33419 - protein, 48 aa, Glycine max
  Clone ID: TF_GmC127329_1.pep
KKNNNRPQHRGKPYSTKSKQFGNHPNNQRTIAMEFAGGNGSKPTTFLT

SEQ ID NO: 33420 - protein, 202 aa, Glycine max
  unsure (1)..(202): unsure at all Xaa locations
  Clone ID: TF_GmC174_6.pep
MPRYDDKYGNTRLYVGHLSSRTRSRDLERAFSRYGRVRGVDMKNDFAFVDFSDPRDADDARYNLDGREVEGRHVTVEFAKGGPRGSWESSGQGQGPPTGPGRCFDCGXDGHWARDCKTGDGKNKCFLSGERGHIEKNCKNSPKKLRHGXKSFRSHSAHHGRRRDRSYSRDRSYSRSISPVGRERSPVSEDRSESSTLLDKKA

SEQ ID NO: 33421 - protein, 240 aa, Glycine max
  Clone ID: TF_GmC25809_2.pep
RVASATYIHIFAKPPIPLSVSTVALSRDNLCKNCKRPGHYARECPNVAICHNCGLPGHIASECTTKSLCWNCKEPGHMASSCPNEGICHTCGKAGHRARECSAPPMPPGDLRLCNNCYKQGHIAAECTNEKACNNCRKTGHLARDCPNDPICNLCNVSGHVARQCPKANVLGDRSGGGGGARGGGGGGYRDVVCRNCQQLGHMSRDCMGPLMICHNCGGRGHLAYECPSGRFMDRYPRRY

SEQ ID NO: 33422 - protein, 186 aa, Glycine max
  Clone ID: TF_GmC10165_1.pep
MYQQQGSDPTKQSPATGFPVSYSNSTTYSTNEASYAPVPPPQPKPLVDWSTGLCDCFSECGNCCMTCWCPCVTFGRVAEIVDKGSTSCGASGALYTLICCVIGCGCLYSCFYRPKMRRQYGLKGNGCSDCLIHCFCEPCALCQEYRELQHRGFDMIIGWHGNVEQRSRGVAMTATTAPSVENGMSR

SEQ ID NO: 33423 - protein, 94 aa, Glycine max
  Clone ID: TF_LIB4390-027-Q1-N1-B2.pep
KMLPKTVTESILICISRVGVISKGTSVFRGVSMKFSICFGKWYWIKNSVNSMIMLSYFWGEFGGLYGPVFYLTMLLVFNIFLNLPGLGTDRKNE

SEQ ID NO: 33424 - protein, 1112 aa, Glycine max
  Clone ID: TF_GmC2654_4.pep
MTNDSSKMTSKFAKLDKFEGQDFRRWQKKIHFQCCQEKVVYVLSTPMPVYMEDETLDQTRKRSKWENDDYICRGHILNGMSDSLFDIYQNIESAKELWDSLESKYMAEDASSNKFLVSNFFNYKMSDSRPVMEQYNELLRILGQFTQHDLKMDESIAVSSIIDKLPSSWKDFKHTLKHKKEELTLVQLGSHFMIEESLRAQEIDKVNDKTVAGSSSVNMVEESGTVKQNYNAKGNKRKFQGNKNKGPNKQTKLSCWKCGKPGHLKRDCRVFKGKNKAGPSGSNDPEKRQGQIVVNNFNSNTNSNYVSLISNAFYVQDDDVAWWFDSGATSHVCKDRRWFKEFRPIDDGSIVKMGNVATEPILGLGCVNLVFTSGKSLYLDNVLFVPGIRKNLLSGMVLNNCGFKQVLESDKYILSRHGSFVGFGYRCNGMFKLNIDVPFVHESVCMASCSSITNMTKSEIWHARLGHVHYKRLKDMSKTSMIPPFDMNIEKCKTCMLTKITRKPFKDVKSETKVLDLIHSDLCDLHATPSLGHKKYLVTFIDDASRYCYAYLLNTKDEALDKFKIYKKEVELHQNGLIKTLRTDRGGEYYDPVYFQSTGIIHQTTAPYTPQQNGVAERKNRTLKEMVNSMLSYSGLSEGFWGEAMLTACYLLNRIPNRRNKVTPYELWHKKTPNLSYLKIWGCRAVVRLTEPKRKTIGERGIDCIFIGYAEHSKAYRFYVLESNDSVAVNSVIESRDAIFDEQRFTSIPRPKDMNSMSKVSVNIEDIPLTSTETRKSTRVRKAKSFGDDFQLYLVEGSRNDIEFQYQYCLNVEEDPKTFSEAMASRDAVFWKEAIQSEMDSIMQNNTWKLVDLPPGCKPLGCKMIFRRKMKVDGTVDKYKARLVIQGFRQKEGIDFFDTYAPVARISTIRLLLALAAIHNLLIHQMDVKTAFLNGELDEEIYMKQPEGFVMPGNENKVCKLMKSLYGLKQAPNQWHQKFDEVVLSSDYVLNQADKCLYSKFDTHCKGVIICLCVDDHLIFGIDQHQVDETKTFFSSTFDMQEMGQAAVILGIKIKREHILIFISQSHYIEKILEKFNFIDCSRVRTPIDHKQKLAPMKSVEGSQLKNSGATE

SEQ ID NO: 33425 - protein, 150 aa, Glycine max
  unsure (1)..(150): unsure at all Xaa locations
  Clone ID: TF_LIB4391-053-R1-K1-G3.pep
MSMHFLQWQHLGFFVSRDNLCKNCKRPGHYARECPNVAICHNCGLPGHIASECTTKSLCWNCKEPGHMASSCPNEGICXCGKAGHRARECSAPPMPPGDLRLCNNCYKQGHIAAECTNEKACNNCRKTGHLARDCPNDPICNLCNVSGHV

SEQ ID NO: 33426 - protein, 222 aa, Glycine max
  unsure (1)..(222): unsure at all Xaa locations
  Clone ID: TF_GmC111765_1.pep
NFKNQNRNVNNTSNRNKNPTRVQHARQHPPAKNNPGEPFLCYNCGKPGHMARKCRNPSMTGAPQSNMTQEPYIAVITEINMIGGSDGWWVDTGASRHVCYDRAMFKTYTNVENKKVLLGDSHTTTVAGTRDVELKFTSGKTLILKDVMHTPEMRKNLVSGFLLNKAGFTXTIGVDLFTLTKNGIFVRKGYATDGMFKLNLDINKVSPSAFLLCDFNIWHYRV

SEQ ID NO: 33427 - protein, 279 aa, Glycine max
  Clone ID: TF_GmC17809_1.pep
MAGKEENRIFVGGLSWEVTERQLEHAFARYGKILECQIMMERDTGRPRGFGFITFADRRGMEDAIKEMHGREIGDRIISVNKAQPKMGGDDADQGYRGGYSSGGRGSYGAGDRVGQDDCFKCGRPGHWARDCPLAGGGRGRGGSSFPSRPRFGAAGGHGDRLGGERDRYVDDRYEGGRYGDRDRFDNRDYKYGSRDRYASDRYPTSGDRFASDRYGGGSDYPQNGYGKERGYDRYGGPRGGADRYGSGMGGRDEGRSYRGRPGPYDRPSRGSRSSLDRY

SEQ ID NO: 33428 - protein, 58 aa, Glycine max
  Clone ID: TF_GmC986_9.pep
TVAGGTLVVEAAASADEAATAVESLGILPEIAHQVLVEFTVRVVYVLRIVLSFYFNMS

SEQ ID NO: 33429 - protein, 493 aa, Glycine max
  Clone ID: TF_GmC10165_6.pep
EDVEMILENLPAQRQSMLFSATMPSWVKKLARKYLNNPLTIDLVGDEEEKLAEGIKLYAIAATATSKRTILSDLVTVYAKGGKTIVFTQTKRDADEVSLSLTNSIMSEALHGDISQHQRERTLNGFRQGKFTVLVATDVAARGLDIPNVDLIIHYELPNDPETFVHRSGRTGRAGKQGNAILLYTSSQRRTVRSLERDVGCKFEFVSAPAMEEVLESSAEQVVATLGGVHPESVQFFTPTAQRLIEEQGTSALAAALAQLSGFSRPPSSRSLITHEQGWITLQLTRDSDSRRYFSARSITGFLSDVYPAAADEVGKIHLIADEKVQGAVFDLPEEIAKELLNRDIPPGNTVSKITKLPSLQDDGPPSDFYGRFSDRDRSSRRGSTSRGGFSSRGGSASRDRRGFKSSRGWDGEDSDDDDFGDRSSWRGGRNFKTGNSWSRAAGRSSGDDWLIGGSRRSSRPSSSDRFGGACFNCGESGHRASDCPNPSNRRSF

SEQ ID NO: 33430 - protein, 176 aa, Glycine max
  Clone ID: TF_GmC173_13.pep
MSDVEEYRCFIGGLAWSTSDRKLKDTFEKFGKLIEAKVVVDKFSGRSRGFGFVTFDDKKAMDEAIDAMNGMDLDGRTITVDRAQPQQGSTRGDGDRYRDRGRDRDRDHGGGGGRGSNGGECFKCGKPGHFARECPSEGSRGGKYGGRESTYGGSSGGGYGPDRADRSSGGRSRGWW

SEQ ID NO: 33431 - protein, 267 aa, Glycine max
  unsure (1)..(267): unsure at all Xaa locations
  Clone ID: TF_GmC45275_1.pep
MVSQRQRLARKRYKAEHPELFPKPEPTPPKDPEKKKKKKKNSAFKRKRPEPKPGSRKRHPLRVPGMKPGESCFICKAMDHIAKLCPEKAEWEKNKICLRCRRRGHRAKNCPXEVLDGAKDAMYCYNCGENGHSLTQCPHPLQEGGTKFAECFVCNQRGHLSKNCPQNTHGIYPKGGCCKICGGVTHLAKDCPDKGKSGSVAANRPADGWMRIEERPMGQVTKFVSGDDIEDDFMTDDIHSADKKKPAKSTEDHVKPKKKEGPKVVNF

SEQ ID NO: 33432 - protein, 150 aa, Glycine max
  Clone ID: TF_GmC85470_1.pep
QNPCNQPQLMTVTYSQFNRRNHNITHSHSFPFPNIRTFPHKMPFLPTVKTPSSSSTATAAASPIPTITINTTTTTLSMVTIPRQVTYSSTIITLRTCCSSTEPSAEASSFSPPYSDAEAPCTARSNGGSDLHGHGAAAVPVIEEKLNGLT

SEQ ID NO: 33433 - protein, 207 aa, Glycine max
  Clone ID: TF_GmC104291_1.pep
GTATGCYKCGKPGHWSRDCPFSAPNPNPNSNTATTPNPNTPNPSSSSFKSRSATEKPKKLPRTKPKLTPELLLSDEGLGYVLRYFPREFKYRGGGHEVRDLGNLLRLYTEWHSRLLPYYSFNQFVHKVEKVAATRRVKTCLRELRERVASGGDPTKLREPPVVHDIPSDEHGYVVSAEDGGATHQETDVFAESENVNDIQEDMLNDI

SEQ ID NO: 33434 - protein, 174 aa, Glycine max
  Clone ID: TF_GmC9855_7.pep
MSRVYVGNLDSRVTERDLEDEFRVFGVIRSVWVARRPPGYAFIDFDDRRDAQDAIRELDGKNGWRVELSHNSRGGGGGRGGRSGGSDLKCYECGEPGHFARECRMRGGSGRRRSRSPPRFRRSPSYGRSPRGRSPRHRSLSPRGRSYSRSPPYRGREEVPYANGKGRKNIRHDE

SEQ ID NO: 33435 - protein, 143 aa, Glycine max
  unsure (1)..(143): unsure at all Xaa locations
  Clone ID: TF_LIB4167-066-Q1-N1-F3.pep
LLGLLLVLCHFFIYWAFSFLFYGAGKNGWRVELSHNSXGGGGGRGGRSGGSDLKCYECGEPGHFARECRMRGGSGRRRSRSPPRFRRSPSYGRRSYSPRGRSPRHRSLSPRGRSYSRSPPYRGREEVPYANGNGLRERRRSRS

SEQ ID NO: 33436 - protein, 170 aa, Glycine max
  Clone ID: TF_LIB4204-002-Q1-K1-E1.pep
MSRVYVGNLDSRVTERDLEDEFRVFGVIRSVWVARRPPGYAFIDFDDRRDAQDAIRELDGKNGWRVELSHNSRGGGGGRGGRSGGSDLKCYECGEPGHFARECRMRGGSGRRRSRSPPRFRRSPSYGRRSYSPRGRSPRRRSLSPRGRSYSRSPTYRGREEVPYANGNGP

SEQ ID NO: 33437 - protein, 287 aa, Glycine max
  Clone ID: TF_GmC174_3.pep
MPRYDDKYGNTRLYVGHLSSRTRSRDLERAFSRYGRVRGVDMKNDFAFVDFSDPRDADDARYNLDGRDVDGSRIIVEFAKGAPRGSREYLGRGPPPGSGRCFNCGLDGHWARDCKAGDWKNKCYRCGERGHIERNCKNSPKKLSTRRGRSYSRSPVRSHSPHRGRSRDRSYSRDRSYSRSRSPVRREESPVREDRSQSPQHKNSPQPSKTRKHSPSPDRSPQKRGDTSPDNDRLSRSPARDPEDRGYDSPKVNGRSGSPSCSPRDDDRSPIDDDNNHRHSPRGSESP

SEQ ID NO: 33438 - protein, 192 aa, Glycine max
  Clone ID: TF_GmC92326_1.pep
GSSSSRDVTGVDGGPLQPRAAAGNNNRAAGSGFGFGARRNGGGGAACYQCGEFGHLARDCNRSSNSGGGGGGSGGGCFNCGGFGHLARDCVRGGGGSVGIGGGGGGGSCFRCGGFGHMARDCATGKGNIGGGGSGGGCFRCGEVGHLARDCGMEGGRYGGGGNSGGGGGGKSTCFNCGKPGHFARECVEASG

SEQ ID NO: 33439 - protein, 237 aa, Glycine max
  unsure (1)..(237): unsure at all Xaa locations
  Clone ID: TF_GmC25809_1.pep
MSSDSRSRSRSRSPMDRKIRSDRFSYRDAPYRRDSRRGFSRDNLCKNCKRPGHYARECPNVAICHNCGLPGHIASECTTKSLCWNCKEPGHMAXSCPNGGMWHTCGIAGHXLRRVLSPSKSSKGVEVCNNCRKTGHLARDCPNDPICNLCNVSGHVARQCPKANVLGDRSGXGGGGGARGGGGGGYRDVVCRNCQQLGHMSRDCMGPLMICHNCGGRGHLAYECPSGRFMDRYPRRY

SEQ ID NO: 33440 - protein, 125 aa, Glycine max
  Clone ID: TF_GmC92326_2.pep
ALEVVAEADLALGVADLDTWRGIAPPGRATLAVEEAVEVVFGVGRLVIWLGIAAWKEGDLVVVAEAAAAVEKALALIVGSQGILRGNVLKLQVEVKKGLLHFAKGEKRWNSTYSLFWHILTVINL

SEQ ID NO: 33441 - protein, 258 aa, Glycine max
  unsure (1)..(258): unsure at all Xaa locations
  Clone ID: TF_GmC25809_3.pep
MSSDSRSRSRSRSRSPMDRKIRSDRFSYRDAPYRRDSRRGFSRDNLCKNCKRPGHYARECPNVAICHNCGLPGHIASECTTKSLCWNCKEPGHMASSCPNEGICHTCGKAGHRARECSAPPMPPGDLRLCNNCYKQGHIAAECTNEKACNNCRKTGHLARDCPNDPICNLCNVSGHVARQCPKANVLGDRNGGGGXAAARGGGGGGYRDVVCRNCQQLGHMSRDCMGPLMICHNCGGRGHLAYECPSGRFMDRYPRRY

SEQ ID NO: 33442 - protein, 226 aa, Glycine max
  Clone ID: TF_GmC55382_1.pep
TIVKAEKVNFASKSRVNLELIFNELRAEKSKGITIPNSVTNNTRLGSVETGQVTPPAYYKSNANTSRDFGMPANQVGQQHGNQYSNISSAGAAPGSYTSCTNCGVSGHSSALCPNIRNVPGHSAGGGFANRASAGLGGGGGASVECYKCHQSGHYARDCPGFSAAPPSSYGSNSGGGGSGECFKCHQTGHWARDCPGLSAAPSSYGSANAMQGRYGVAQKQQFGGY

SEQ ID NO: 33443 - protein, 199 aa, Glycine max
  unsure (1)..(199): unsure at all Xaa locations
  Clone ID: TF_GmC174_1.pep
MFSRARRNQRCPRYDDKYGNTRLYVGXRLSSRTRSRDLERVFSRYGRVRGVDMKNDFAFVEFSDPXRDADDARYNLDGRDVEGSRIIVEFAKGGPRGSRDREYMGRGPPPGSGRCFNCGIDGHWARDCKAGDWKNKCYRCGERGHIEKNCKNRPKKLSQRGTSLSRSPVRSRSPTXREEARDRSYSRDHSDSRARSPVR

SEQ ID NO: 33444 - protein, 171 aa, Glycine max
  Clone ID: TF_LIB4367-017-R1-N1-F11.pep
HFEQEFSDPRDADDARYSLDGRDVEGSRIIVEFAKGGPRGSRENLGRGLPPGSGRCFNCGIDGHWARDCKAGDWKNKCYRCGERGHIEKNCKNSPKKSSRHGRSLSRSPVRSHSPRRGRSRDRSYSRDRNYSRSRSPVRRERSPVSEDRSQSPEPSKIRKHSTSPDQSSPT

SEQ ID NO: 33445 - protein, 73 aa, Glycine max
  Clone ID: TF_LIB3242-590-P1-J1-B7.pep
YNSGESGHLSRDCRGGGGGDRYGGGGGGGTYGSRRGGRYSGGRSSRCRRRNCYRRGETGHFARDCPSSARRIY

SEQ ID NO: 33446 - protein, 552 aa, Glycine max
  Clone ID: TF_GmC2715_1.pep
MGRKEKQNAKAIDEEHDVVNFNGASTPSLVFSSDDDEANQDLSLKIVEKAMRMRAAKHAPNDDVSSPFSQKSELAVPLNDVVSDLPSAIADSEVTEKKKTAKLKREAAGDQSVVIAEEQEMEETSNATENHEFVEGSPVLIGHNMVLRKLLRGPRYFDPPDSSWGACFNCGEDGHAAVNCSAAKRKKPCYVCGGLGHNARQCTKAQDCFICKKGGHRAKDCLEKHTSRSKSVAICLKCGNSGHDMFSCRNDYSPDDLKEIQCYVCKRVGHLCCVNTDDATPGEISCYKCGQLGEADRRGSRLRDEITSGATPSSCFKCGEEGHFARGCTSSIKSGKRNWESSHTKDKRSQKENDYMGNRSASNDMVGARRKKRSPTEERGFSTPKKSKSRGGWTAEYPTEERGFTTPKKSKSRGGWTTEHPTEERGFTTPKKSKNRGGWTSEHPLEQKDYTTPKKSKSRGGWMSEHPEEFFPPMSSRSNGYRSLGTPSSRNNKIHSFGGGSHTPSYKSSKVWNDHAGTSMSQGSARSNHHRFSASRFGNSSSDGHGRNYNWW

SEQ ID NO: 33447 - protein, 59 aa, Glycine max
  Clone ID: TF_jC-gmXLIB3563P014ag08a2.pep
MNKGELSKGPGRILREADQASLCWDRDAKAHRANFVGARHARTLLRRTCRSPTPRKAAG

SEQ ID NO: 33448 - protein, 61 aa, Glycine max
  Clone ID: TF_LIB3242-138-Q1-J1-C10.pep
MCKGAEGEKQHGFCSSYLHKECATRSATCCELCGLQASLYCQADDAYLCRKCDKRVHEANF

SEQ ID NO: 33449 - protein, 68 aa, Glycine max
  Clone ID: TF_LIB3056-003-Q1-N1-G10.pep
TDSGAPVACQDKPCDQYKLASAVLFLRPNSALLCISCDSDIHCSNKLMYRHDPVSMCETCEPAPIDVT

SEQ ID NO: 33450 - protein, 73 aa, Glycine max
  Clone ID: TF_jC-gmle01810044g07a1.pep
VVRDISACDRVEQEPSSGSVVVVQVSIVCELVDVDPGASCIHINLITIVPLQSVCLRGCVVPGGAYPVSVNLA

SEQ ID NO: 33451 - protein, 109 aa, Glycine max
  unsure (1)..(109): unsure at all Xaa locations
  Clone ID: TF_7591390.pep
KIQYSVYKATKAKVLYCTNEAALYXECDKKVHTANKLTSKHQKIPLSLSASHIPKYNIXPKIINYFFYLENQALLYRNYNISIHTXNTYISNHQEWLLTSMRVNLKATE

SEQ ID NO: 33452 - protein, 91 aa, Glycine max
  Clone ID: TF_GmC24129_6.pep
DNSDHKTNISMQRQSGSTPWISGLHKNHIYNPSLDSLFSCTSVSINESPPRNSLYKPRYAAKNREVPPSYLKMQKPNFFFSVFPVLSCALC

SEQ ID NO: 33453 - protein, 145 aa, Glycine max
  unsure (1)..(145): unsure at all Xaa locations
  Clone ID: TF_jC-gmXLIB3563P061ad12d2.pep
MKIYCNECXLVEPQFLCXANEAALCWECDEKDHADNKLAFKHQRVAVSISWYHLPEWDIGQEPFSYFFCLQERALLCIKMXDVALHTGKAFVSRHQKVLFTGVRVCLEAIEPGASLTSLTTNSGERVSDAKNSSVCRKVFTVPQP

SEQ ID NO: 33454 - protein, 62 aa, Glycine max
  Clone ID: TF_jC-gmst02400049f05a1.pep
MAFKLCDTCRWDTDTLFWRPDAVFLWGACDFKVHAANKLASRHPHVLLCEVCKQAPTHVIWK

SEQ ID NO: 33455 - protein, 243 aa, Glycine max
  Clone ID: TF_GmC998_1.pep
MKPKTCELCHQLASLYCPSDSAFLCFHCDAAVHAANFLVARHLRRLLCSKCNRFAAIHISGAISRHLSSTCTSCSLEIPSADSDSLPSSSTCVSSSESCSTNQIKAEKKRRRRRRSFSSSSVTDDASPAAKKRRRNGGSVAEVFEKWSREIGLGLGVNGNRVASNALSVCLGKWRSLPFRVAAATSFWLGLRFCGDRGLATCQNLARLEAISGVPAKLILGAHANLARVFTHRRELQEGWGES

SEQ ID NO: 33456 - protein, 125 aa, Glycine max
  Clone ID: TF_GmC24129_2.pep
LSLETTRPLNTTQYNSLISRAQEEERENQKSKREKEKSGVSAHSCPAVFLGCAPPSIPLLRDPPGLAPWPVFSLLPASRCIAGMRFLVSLSPRLLASMVWGRIRLLHLQIRRGNILYFLRAYCGL

SEQ ID NO: 33457 - protein, 215 aa, Glycine max
  unsure (1)..(215): unsure at all Xaa locations
  Clone ID: TF_GmC12_1.pep
MRTLCDVCESAAAIVFCAADEAALCSACDHKIHMCNKLASRHVRVGLADPTDVPRCDICENAPGTXAFFYCEIDGSSLCLQCDMIVHVGGKRTHGRYLLLRQRAQFPCDKPAQMEELGLQPMDQNESRRDESQSLKLKIRDSQQNHSVSPVPRQENNIDGHGKMDKKLIDLNTRPLRLNGAAPNNQERGMDILRGNNHKSASVPPVESFKQESEK

SEQ ID NO: 33458 - protein, 419 aa, Glycine max
  Clone ID: TF_GmC117_1.pep
MSSATKNAANAVGAKTARACDSCITKRARWYCAADDAFLCQACDSSVHSANPLARRHERVRLKTASYKSTDEQQQQQQQQPPTWHTKKPRTPRHRKHSRNNNPFHLVPEEGSEEANSHDENEEQLLYRVPIFDPFVAELCGTNSSPSPVTSTDQGVVAAAEVEYKGIQSNGFCSNSNEMENLHGMLPSDAELAEFAADVESLLGRGLENKCVGMEELGLVDAKEEECSVGSGKVKMEDQEESPLVEMEMDMVVGRDDQSFELSFDYETCEEVKVCDLGLGNELGAKKENDDEVKKNKISLQLDYEAVIIAWASQKSPWTTADKPNLDPDECWKQCMGSCETAYHHPCGEMGGFGIHPVIIDGGREARVSRYREKRRTRLFSKKIRYEVRKLNAEKRPRMKGRFVKRASFAPPTFPLLNK

SEQ ID NO: 33459 - protein, 423 aa, Glycine max
  Clone ID: TF_GmC5877_1.pep
MDPLCEFCRVVRAVVYCKSDSARLCLHCDGCVHSANSLSRRHSRSLLCDKCNSQPAMIRCMNHKLSLCQGCDWNPNDCSALGHRRLALNCYTGCPSLAEFSRLWSFVFDANSSLGGWESVGTLPKSESCTSQCLEQTDHNGGYFGLVSDKLDEIESCVRYQPRMDQSQIIPSNPNYTPYCKDEAFFFPQDSNQPKLQECPNLGIHDGNELCEGFNVDNVQLNFEIADEIFYCSQVATRYHLEDGGMDCLLMDKNIAVTESSSLIESAMEASSSIQQDCVAFQSSRAGGSASVMQVINSNTNCALMNPSCTKNISLGFPQGLVHSNMPLQFPNIVGENNSTEYQDCGLSRVGESPWESNLEGTCPQARDKAKMRYNEKKKTRTFGKQIRYASRKARADTRKRVKGRFVKAGEAYDYDPLGTRDI

SEQ ID NO: 33460 - protein, 427 aa, Glycine max
  unsure (1)..(427): unsure at all Xaa locations
  Clone ID: TF_GmC906_1.pep
MTNEMKEASALGARTARACESCLKVRARWXCAADDAFLHHGCDNMVNSANQLVGGQKRLKLQTPSSMCNNTLTPKLVXPNCMRTKSKISLQYQSRSPSFVTKGESVCLDLTXRSQKRAFNYNISHRPLVPELGKEEPMLNDETEEQLQCRVPLFDAGFSRIYNEVKDXVVAFCEEALDLENFSSEFLPSDTDLAEFTADVKSFLGNGADEDSPDDDEHVKESELLILDCKEEEGDEEMDECFDVVLIEAKEGMVKVKDEEKLDADDDTACHLDSILDMNGEAFNWNIVESESPAQAQEDEVSKVGTKKDIFLRLNYEEVITAWASQGSPWTNGTPPKFFNSDDCWLDFLGSNGGNVQCCYGAVGSLRVHADGGREARVSRYREKRRTRLFAKKIRYEVRKLNAEKRPRMKGRFVKRTPFVGATALPA

SEQ ID NO: 33461 - protein, 85 aa, Glycine max
  Clone ID: TF_uC-gmflminsoy034d11b1.pep
MRTLCDACESAGGIVFCAADEAALCRACDEKGHMCNKLASRHVRVGACRPSDVPRCDICENAPAFFYWETDGSSFWLQCDMIGHG

SEQ ID NO: 33462 - protein, 107 aa, Glycine max
  unsure (1)..(107): unsure at all Xaa locations
  Clone ID: TF_GmC6837_2.pep
MGYLCDFCGDQRSLVYCRSDAACLCLSCDRNVHSANALSRRHSRTLVCERCNSQPAFVRVCXMRKISLCQNCDWVGSMGPHHLSSTHKKASINCYSGCPSAAEFSSI

SEQ ID NO: 33463 - protein, 208 aa, Glycine max
  Clone ID: TF_GmC117_2.pep
MSSATKNAANAVGGKTARACDGCITKRARWYCAADDAFLCQACDSSVHLANPLARRHERVRLKTASYKSTDERRQPPTWHTKKPRTPRHGKHSRNNNPFHLVPEEGSEEANSHDENEEQLVYRVPIVDPFVAELCGTNSSPSSVTSTDQGVVAAAAAASAEVEYKGIQSNDFCSNSNEIENLHGMLSSDAELAEFAADVESFWVRGLE

SEQ ID NO: 33464 - protein, 221 aa, Glycine max
  Clone ID: TF_GmC264_1.pep
MKNCELCKLPARTFCESDQASLCWDCDAKVHGANFLVERHTRTLLCHACQSPTPWKASGAALGNTVSLCERCAGGTTEQGQESQGGNDDDIDTDIDTDDEDDYDESEDEVAADEEDGDNQVVPWSSEPPPPAPSSSSSEESVSRCNNVDEVSTTLKRRRQEDNDFQGWNSNNWGCERSEVERGGWLVRLRRRTADDVAVEQRSARAASPDGCCGDRASEDV

SEQ ID NO: 33465 - protein, 31 aa, Glycine max
  Clone ID: TF_701038605H1.pep
MKIQCNVCEAAEAKVLCCADEAALCWECDEK

SEQ ID NO: 33466 - protein, 205 aa, Glycine max
  Clone ID: TF_GmC903_1.pep
MEESSTTCVLCEKRAMMLCDSDQAKLCWECDEKVHSANFLVAKHSRVLLCRLCHSPTPWKASGMKLTPTVSFCNRCVAERNARWNRLVNNENEHQQQQQQQQQSDFVVDDGREYGSDHVFDDDDGDYSDDSGEEEEEDEDDEEENENQVVPMSSGSATSPPKVACLALKRLRNNSFLSILHMMRQRALHLRCLVLHCLVVMNHPL

SEQ ID NO: 33467 - protein, 80 aa, Glycine max
  Clone ID: TF_LIB3094-087-Q1-K1-A12.pep
FLCLGCDSKVHAANKLASRHARVWVCEVCEQAPAHVTCKADAAALCLTCDHDIHSANPLARRHERVPVTPFYDTFNSDNS

SEQ ID NO: 33468 - protein, 369 aa, Glycine max
  unsure (1)..(369): unsure at all Xaa locations
  Clone ID: TF_GmC271_1.pep
MRDMKDAGALGGKTARACDSCVSRRARWFCAADDAFLCHGCDTLVHSANQLASRHERVRLQTASSKVTTTHAWHSGFTRKARTPRHNSKHFALQQRLKDEVLFNNTSVLPLVPELGGEEQEPVVVDNDETEEQMLCRVPVFDPFDVRTDDLDSFSDMDFAEFAADVESLLEKEDDEISAYVXKGRGEEEIDGDVXVIVKDEEEIDGDVACYLESVFDDAFHWNNIESVLSDAREEKEGVVACDVGVGDEEGGTKRDIFLRLNYDEVITAWSSQGSSPWTTSNPPKFNSDYDFSLGLSGVGGEVRSLRGHLDGGREARVSRYREKRRTRLFAKKIRYEVRKLNAEKRPRMKGRFVKRTCFVGANAFPAYH

SEQ ID NO: 33469 - protein, 247 aa, Glycine max
  unsure (1)..(247): unsure at all Xaa locations
  Clone ID: TF_GmC271_2.pep
MRDMKDAGALGGKTARACDSCVSRRARWFCAADDAFLCHGCDTLVHSANQLASRHERVRLQTASSKVTTTHAWHSGFTRKARTPRHNSKHFALQQRLKDEXSLQQEPVVVDNDETEEQMLCRVPVFDPFDVRTDDLDSFSDMDFSEFAADVEGRLDKEDDEISAYVGGGEGVQGVLAKVKGEEEIDGDVACYLESVFDMISDDAFHWNNIESVVSDAPEEKGCVVPCEGGVREQGGIKGDIFLRLNY

SEQ ID NO: 33470 - protein, 229 aa, Glycine max
  Clone ID: TF_GmC226050_1.pep
NGIPGATHASGNIFSSSLSPLVHFTIEILRSASSHAYHHSPFTTMLPCDYCHSKPAILFCRPDSAKLCLLCDQHVHAANALSLKHVRFQICDSCKTDTAVLRCSTDNLVLCHHCDVETHGAAASSHHQRHRLHGLSGCPSVTEIASALCLDFRAQDPVVPTAASGGRDEVYEQVLEIARQRNDDLGAEQLKFDESPINDVVVVDEMLMQQTPFTSLLYVPNSESEFHSR

SEQ ID NO: 33471 - protein, 295 aa, Glycine max
  Clone ID: TF_GmC24129_3.pep
MGYICDFCGDQRSMVYCRSDAACLCLSCDRNVHSANALSKRHSRTLLCERCNSQPAFVRCVEEKISLCQNCDWLGHGTSTSSSTQAREAINCYSGCPSAAELSSIWSFVLEIAAISESTCEQELGLMSINENKCVGVPPEDQNVSGSDEVTDLPALNKSLVGASLMPESSSEPCILDQPAGPTNECLPKLYCPATKCPALSEDDNLYDDFNMDEVDLDLENYEELFGMALSHSEELFENGGIDSLFGTKGMSAGDSNCQEAIAAEVLNSSYLLSVIIMAFFTNGASHVMFCILHR

SEQ ID NO: 33472 - protein, 143 aa, Glycine max
  unsure (1)..(143): unsure at all Xaa locations
  Clone ID: TF_GmC723795_1.pep
MEKVCEFCTALRPLVYCKADAAYLCLSCDSXVHLASAASGRHLRNXVCHSCGYHLAYVLCLEHKMLICRDCDQKLHNLSLPHKKRAIRSFMGCPSAKDFAALWGFESNEIENYSAQDQFGSVSCVSADLNVAQVSGKPGIQTG

SEQ ID NO: 33473 - protein, 116 aa, Glycine max
  unsure (1)..(116): unsure at all Xaa locations
  Clone ID: TF_GmC24129_4.pep
MGYICDFCGDQRSMVYCRSDAACLCLSCDRNVHSANALSKRHSRTLLCERCNSQPAFVRCVEEKISLCQNCDWLGHGTSTSSSHXKRQAINCYSGCPSAAELSSIWSFCVRNRCHK

SEQ ID NO: 33474 - protein, 364 aa, Glycine max
  unsure (1)..(364): unsure at all Xaa locations
  Clone ID: TF_GmC38808_1.pep
MSCPKHHTLTPRMLEGQATMRTWARMCDTCRSVPSTVFCRSHTAFLCATCDTRLHVSLTWHERVWVCEACERAPAAFLCKADAVCLCAYCDADIHACNPLASSHHPVPILPIHARHNNNNDDDDVADVDDEDETASWLLLNPIKSATVPNTNNHNNNNGFLYNEEVDEYLDLIDNCXSCLDNNHFASAAATTDHYAQHQHFAGVSQKSYAGDSVVPVQQHQHFQLGLEFDNSKPAFSYNGSVSQSVSVSSMDIGVVPESPMRDVSIAHTRPPKGTIDLFSGPPIQVPSHFSPMDREARVLRYREKKKMRKFEKTIRYASRKAYAETRPRIKGRFAKRTDVEAEVDQMFSTTLITEVGYGIVPSF

SEQ ID NO: 33475 - protein, 167 aa, Glycine max
  Clone ID: TF_GmC162685_1.pep
SPNSKQRTCDYCGSFTALLYCRADSAKLCFFCDRKVHFPNQLFSKHKRAQLCDACGDSPASVLCSAENSVLCQNCDCGKQKHLASEAHQRRPLEGFSGCPSVTELLTILGLSEKSLLSNEGTSQIDDDLSDLHVWSAPSINGLEDLITTTASSQKERVGACGRHKEE

SEQ ID NO: 33476 - protein, 512 aa, Glycine max
  Clone ID: TF_GmC919_1.pep
MAPFPLMCFVILLLSSTVSVTATATQTTLTVGKLDQVPHIMCKECELPPPPPKECPPPPIPLAPPPPLPPSPSPPLPPSPPPPLPPSPSATLPAPIPLTHSLPKLIQVANPSSFNSSLATTAVLPLAAFFKSDFRELAMGIERGGFKGFRSAWSVPPKPCDSCKLASAALFCRPDSAFLCIACDSNIHCSNKLASRHERVWMCEVCEQAPAAVTCKADAAALCVTCDSDIHSANPLAQRHERVPVEPFFDSAESIVKASAAATFGFIVPSDDGGASDAFAPDDSDAAAWLIPNPNFGSKLMDAPEIKSKEIFFSEMDPFLDFDYSNSFQNHNSAGNDSVVPVQKPSLAPPLINNHHHHQSETCFDVDFCRSKLSSFNYPSNSLSQSVSSSSLDVGVVPDGNTVSDMSYSFGRNSSDSSGIVVVSGNSVGQGATQLCGMDREARVLRYREKRKNRKFEKTIRYASRKAYAETRPRIKGRFAKRTEIDSDVERLYSPGPAVLMLDTPYGVVPSF

SEQ ID NO: 33477 - protein, 54 aa, Glycine max
  Clone ID: TF_LIB3138-069-P1-N1-A9.pep
ESPIIQTLCDACESAQAIVICASDKAALCLACDEKINLFELTGSHVQQAISYVC

SEQ ID NO: 33478 - protein, 118 aa, Glycine max
  Clone ID: TF_LIB3242-471-P1-J1-G3.pep
MCKGAEGEKQHGFCSSFLHKESATRSAICCELCGLQASLYCQADDAYLCKKCDKRVHEANFLALRHIRCFLCNTCQNLTRRYLIGASLEVVLPANINWTIRNLLNNRGIYRKCSRMHN

SEQ ID NO: 33479 - protein, 125 aa, Glycine max
  Clone ID: TF_GmC906_4.pep
MTNEMKEASALGARTARACESCLKVRARWYCAADDAFLCHGCDNMVHSANQLASRHERVKLQTASSKVNYSVTPKVAWHSGFTRKARTPRHNNNRHSSLKQQQQKKPLHEERGEEEVFFNNTISL

SEQ ID NO: 33480 - protein, 48 aa, Glycine max
  Clone ID: TF_LIB3028-010-Q1-B1-A12.pep
MSIHCEVCETAPGAVICCADEAALCAKCDVEVHGSNKLDRKHETPLLQ

SEQ ID NO: 33481 - protein, 114 aa, Glycine max
  Clone ID: TF_GmC36880_2.pep
GSGGCCGGAATRLCARCESVDYCSLSHQIAHWNRHKHECDRLQQQLKSVEVLNDFPFTFSRESTFQVCVKQETRCSFLSKRGLHQVEMWMHECACGASSASFDCLGFLHISFIF

SEQ ID NO: 33482 - protein, 212 aa, Glycine max
  Clone ID: TF_LIB4201-003-Q1-K2-F7.pep
MDTDATGDPVDKLKAIQNDDVEYQDEDDDFDDEEEEEDDPITLGFVDKPKNEWSLRRQYFPSKTGGVPAWLDPLNIPSGRSSVCDICGDPLQLLLQVYAPTDKETTFHRMLFVFMCPSMKCLLRDQHEQWKRHPEKPSRSVKVFRCQLPRINPFYSPECPQYNESHEPAGSGAALCDWCGTWKGDKLCSSCRQARYCSEKHQAMSWRTGHKT

SEQ ID NO: 33483 - protein, 343 aa, Glycine max
  Clone ID: TF_GmC165_1.pep
MCEKEVYGEQSICCGRCRAVVYCSSICQKQHWNDTHKSMCGLYKAMMEREEELAIMIFMFPCSADQPCKWLESLGIHQKGMWRRKCSCYSHCSFGLLPVKGGLQELWGGIDEFEYPHDSPFNNHFISSPFLLSGWPEYYNLRSLPLSSPVADILSHPLTVYHILTTLNISSKNLILKGKEVIVHYLGPEGELDWMPAFAEVGHLLNGLGNVQIVMVGPEVPTNLSGTTSGIGSRVRVNLVRGVYQVEASYLPSPHVVIALNSRLESYSSWGGALDVIKSIGVPAFFTDQSEVSCVNAKQVLRNAGLHITHPVTPNPFRSPVKNLTASSNLPSYSNGFVFGVNT

SEQ ID NO: 33484 - protein, 406 aa, Glycine max
  Clone ID: TF_700665732_FLI.pep
MDTDATGDPVDKLKAIQNDDVEYQDEDDDFDDEEEEEDDPITLGFVDKPKNEWSLRRQYFPSKTGGVPAWLDPLNIPSGRSSVCDICGDPLQLLLQVYAPTDKETTFHRMLFVFMCPSMKCLLRDQHEQWKRHPEKPSRSVKVFRCQLPRINPFYSPECPQYNESHEPAGSGAALCDWCGTWKGDKLCSSCRQARYCSEKHQAMSWRTGHKTACQQMKVSSPVFGPNKSGTTSLESHKVGSKNLWPEFEISIEDESEYNRDISEENSLANSLISRNRNDDTMNSLMDNFKGDDDKKSWASFQERIAEAPEQVLRYYRNTNAKPIWPVSSGRPSNADIPKCSYCSGPMSCEFQILPQLLYYFGVDNEVDSLDWASIVVYACEASCEASLPYKNEFAWVQIYSLSTTL

SEQ ID NO: 33485 - protein, 391 aa, Glycine max
  Clone ID: TF_GmC5714_1.pep
MRTRRGACYPGVVSRMCSNVRVTKKKSKDLHMHMHVPAGDSIIYSRKKQKKTPEKLAAGRYDFFESLPDDLVISIFCKLSSTATKPSDFVNVLITSKRLNRLALHSLVLSKASPRTFTIKAKYWCDSAHKFLKHCADAGNVEACYTLGMIRFYCLQNRGSGASFMAKAAINSHARALYALAVIQFNGSGGTKSDKDLRAGVALCARAAFLGHVDALRELGHCLQDGYGVRQNIAEGRRFLVQANARELAAVLSTGAAARTLLSWNLQPQQLRQGSGCPLLSDFGCNVPAPDVMAEWFVARGGSPGPGLRLCSHAGLCSNAGCGRPETRKHEFRRCSVCGEVNYCSRACQALDWKFRHKAECAPVERWLDEDGEDVGNDDGDGEVEVVMVDS

SEQ ID NO: 33486 - protein, 549 aa, Glycine max
  Clone ID: TF_GmC3960_1.pep
MLNKYRGLIIPKGSAILLQMSIHFGIYPRGLLNCGNSCYANAVLQCLTSTKPLVVYLLYRSHSKACCAKDWCLMCELEQHIMILRENGDPLSPSRILWHMRSINCHMGEGNQEDAHEFLRLLIASMQSICLEGLGGEKKVDPRIQETTFIQHTFGGRLQSKVKCLNCNHESERYENIMDLTLEILGWVESLEDALTQFTSPEDLDGENMYRCGRCTSYVRARKQLSIHEAPNILTIVLKRFQEGRYGKINKCITFPEMLDMIPFMTGTGDIPPLYMLYAVVVHLDTLNASFSGHYVSYVKDLQGNWFRIDDIEVQPVLVNQVMSEGAYILFYMRSCPRPPVEHTVKAVQQSVYDSSKHNPMEMQKPNKPGHSRHGSHQFFVSESSPNARPEISTHIIDTTNGFLRKSTNRNALPVTQTYAKNVRSEFSDTTSSDWSLFTSSDEASFTTESTRDSFSTVDYGDSCNMDPISSIFNYPPEKSYLKFSHSRPVTRVFPEKGHVKQVQRIDHSKRVSHSSSNEHPPNGNCGMYVYYGSNPVCGTTQTSSQCEF

SEQ ID NO: 33487 - protein, 153 aa, Glycine max
  Clone ID: TF_LIB4198-004-Q1-K1-B8.pep
MLEPRESDIPVLFLVLVVLPLVAYILLGKWSETSKKRDRINLLAHLAAEEALRAEEMAVADVIPPVSASKNEHHVCARCSAPARTRCSRCKIVRYCSGNCQIIHWRLIHKQECQQLEPHKSSSFPLAVSVEEFGHGDGSYFYENLNNQFLSPS

SEQ ID NO: 33488 - protein, 348 aa, Glycine max
  unsure (1)..(348): unsure at all Xaa locations
  Clone ID: TF_GmC3636_2.pep
MRRPWKHSKNKHDLFECLPDDLVVLILSKLSATASSPSDFINIILTCKRLNRSGLHRLVLSKAGPKVFAIKPKNWSEYAHSFLKHCVNAGNVDACYTLGMIRFYCLKNRGSGLSLMASLRNRSGFPVLYASAVIQXNGSGGSKRDKDLRAGVALSARASLLGHIDALRELGHCLQDGYGVRQNVTEGRRLLVQANVRELAYVLRAVAPPSRCCDESSSLLTWGALRCQRKNNNAVSSLACPLLSDYGYSVAPPEVQPANWFLREWFESGKGKLEEGLRLCAHIGCGRPETRPHEFRRCSVCGKVNYCSRGCQALDWKLRHKIECSPVEMYGDGGVDVENEFVVPNDAV

SEQ ID NO: 33489 - protein, 217 aa, Glycine max
  Clone ID: TF_LIB4167-022-R1-K1-H1.pep
VDPRVRVVCVVVAVIGFVIRHKWQVSEARKEEIKRLFILAAEETARAEKEASYEYGTAVSAAPTNLCAVCYFPATARCAQCKSVRYCSFECQTVHWRQGHKLECRPPSTTHQSDGATSDLGSKVVEQGYSGIHVGKSESEGKECKIASERPPIFDICFSPKVSSGKDANIRVESLAEGNITDSNSELSSNSFSGFSACTGSSDSSGGSSVCGSVMWN

SEQ ID NO: 33490 - protein, 347 aa, Glycine max
  Clone ID: TF_GmC586_1.pep
MSCRKRQKTSPDKTSDDFFDSLPDDLVLSILCKLSSTATSPSDFISVLITCKRLNSLGLHSLVLSKASHKTFSVKAKNWCDSLHRFLKHCADAGNIEACYTLGMIRFYCLQNRGSGASLMAKAAMNSHAPALYSLAVIQFNGSGGTKNDKDLRAGVALCARAAFLGHIDALRELGHCLQDGYGVKLNVTEGRRFLVQANARELAAVLSAGNTKRPWLTWSHHPVTHPRLRSGCPLMSDYGCNVPAPDAHPASQFMSEWFDIRGGFPGPDMRLCSHSGCGRPETRRHEFRRCSVCGVVNYCSRACQALDWKFRHKAECAPVERWLDDDDEDVAGENDGGDDGVMMVDS

SEQ ID NO: 33491 - protein, 126 aa, Glycine max
  Clone ID: TF_GmC24110_3.pep
MLVLGVWDLKWLLQFVFSAFVLAIGLHALLKNTASKYFEIEATFHAMPGPLTDHSLCAVCRNPANKKCSRCISVRYCSQACQQAHWKSEHKMRCKEFQGSASVMNLDQTEVTNRVFKASAAVNTSS

SEQ ID NO: 33492 - protein, 734 aa, Glycine max
  unsure (1)..(734): unsure at all Xaa locations
  Clone ID: TF_GmC5789_1.pep
MLVAVGASWDLNWFLQLLLSVIVVAVGVHYFVKATASKYFLVDANFEGDHHALAAADPMPGALAAAVDPLCAVCATPAPKKCSRCKAVRYCSQACQQSHWMSGHKTVCMNFHGTNARSSAQNGVINRGFKTSAAGGKGSSSIALIPDCGDGAISRPIKQAKDVLFPYDGXMRFLVVLLNHLMCPFLKQTVIWGMXDMGRSLEETSGCKEEQDDTDMVSSGLCSGPPNDNSFDKHPSVSRDHQNMEEDSEHIDVVNCIGGTXGYGKQEDAHEFMRFSIDTMQSVCLDEFGGEKAVPPNLQETTLIQESGNISRHLDAICTKCDKISNQYENMMDLTVEIHGDAASLEECLDQFTAKERLDGENMYKCEGCKDYVKAWKRLTVKCAPNILTIALKRFQSGRFGKLNKRVAFPETLNLSPYMSEAGDGSDIYKLYGVVVHIDMLNASFFGHYICYIKDFQGNWYRIDDWKVMTVEVEEVLSQGAYMLLYSRCSARTSSFQIQTSESSGIAEVQTEVEVEMEVEPGQTEQDECLSNMKALTCSRGSEVLPSDASPELKVSSSYDCESFAGLNSPVKREQFNDVDMMDVDSTGIVNEISCGAVESSYVPISQTDSDLGDVDMGRSLEETSGCKEEQDDTDMVRSGFCSGPPNGSSFFDKHPSVSRDHQNMEEHSEHIDVVNCKLITAKDNACYGNGYVSANDSSMPVEDAGSQFSGISSFPTENDKGNGIKKVEISADI

SEQ ID NO: 33493 - protein, 406 aa, Glycine max; identical to SEQ ID NO: 33484
  Clone ID: TF_GmC880_1.pep

SEQ ID NO: 33494 - protein, 107 aa, Glycine max
  Clone ID: TF_GmC5714_2.pep
GCNVRAPEVHPASLFMAEWFAARGGSPGPGLRLCSHAGCGRPETRKHEFRRCSVCGVVNYCSRACQALDWKFRHKAECSPVQRWLEEDGEDVGNDDGDGEVEVMVDS

SEQ ID NO: 33495 - protein, 220 aa, Glycine max
  unsure (1)..(220): unsure at all Xaa locations
  Clone ID: TF_GmC24110_1.pep
MLLSGGVSDLKWILQFVFYAFVLAIGLHALLKNTASKYFDLDATFHAHAIPGLLMDHSLCAVCRNPANKKCSRCKSVRYCSQACQQMHWKSEHKVRCKEFQGSSTSVMMNLAQTEVTNRVFKASSAAVNRSTCTSSIALIPECGRGTSRTIKQPKSVLFPYDEFVKLFNWDKPGFPPCXLLNCGNSCFANVVLQCLSFTRPLIAFLLEKGHHRECCHNDW

SEQ ID NO: 33496 - protein, 125 aa, Glycine max
  Clone ID: TF_uC-gmflLIB3275P157c04b1.pep
MLLSGGVSDLKWILQFVFYAFVLAIGLHALLKNTASKYFDLDATFHAHAIPGLLMDHSLCAVCRNPANKKCSRCKSVRYCSQACQQMHWKSEHKVRCKEFQGSSTSVMMKLAQTEVTNRVFKASS

SEQ ID NO: 33497 - protein, 187 aa, Glycine max
  Clone ID: TF_GmC154380_1.pep
RKLSLSTLPEKGRSLLATGVLCPRLSRRFSPSSPPGPRRSRLPAWVGVPGEVIISQEPYVCVPNNSSVSPQKRCDGCFTTINNNVLSRCSRCQLAFYCGTACQRSEWKLHRLECEVLSSLHKYKRKSLTPSIRLMLRLYLRRKLQNDKIIPSTAMDNYNLVEALVAHMSDITEEQLVLYAQMANLVN

SEQ ID NO: 33498 - protein, 161 aa, Glycine max
  Clone ID: TF_LIB3242-450-P1-J1-B9.pep
DLQSGLQNRKLSLSTLPEKGRSLLATRDFYPGEVIISQEPYVCVPNNSSVSPQKRCDGCFTTINNNVLSRCSRCQLAFYCGTACQRSEWKLHRLECEVLSSLHKYKRKSLTPSIRLMLRLYLRRKLQNDKIIPSTAMDNYNLVEALVAHMSDITEEQLVLY

SEQ ID NO: 33499 - protein, 123 aa, Glycine max
  Clone ID: TF_GmC142923_1.pep
MEPENGKFSFSEVIEQRSYKGDVYYVEGGENSAEVSDETALKCNDGCAVCGNPSSKVCSRCKAIKYCSQTCQHFDWRSGHKFQCLVEKANTTEKAIVNQGRPANGNVVNLTNSDEVEDNAHSS

SEQ ID NO: 33500 - protein, 84 aa, Glycine max
  Clone ID: TF_GmC95076_1.pep
KLQAQKALSENTRACHTCQKESDTLLKCTRCGISWYCNKACQEIGWKDKGHKDECRLLKNETLKQILLFDWKHFKDFVQFPLSA

SEQ ID NO: 33501 - protein, 155 aa, Glycine max
  Clone ID: TF_GmC5789_3.pep
MLVAVGASWDLNWFLQLLLSVIVVAIGVHYFVKVTASKYFLVDANFEGDHHHALATDAMPGALAAADPLCAVCATPAPKKCSRCKAARYCSQACQQSHWMSGHKTVCKDFRETSARSSAHNGVINRGFKATAAAGKSLLTMALIPGCGAGAISRP

SEQ ID NO: 33502 - protein, 165 aa, Glycine max
  Clone ID: TF_GmC441330_1.pep
MRVTIDLGFWSLVVVAVVGLIVPVIAFVVQRQCQRAAARAEEIKRLLVLAEEESVRAESESEASVYQQNSIVSAPPKNKVCAVCYSPTTTRCARCKAVHYCSGKCQIVHWRQGHKDKCHPPSPTCQTEDLVSDLGKKVAEPDYRGIHDEKSQTKSTEYATSSEKP

SEQ ID NO: 33503 - protein, 94 aa, Glycine max
  Clone ID: TF_LIB3049-052-Q1-E1-H7.pep
MECAAKGSGGRCGGSGSGGATRLCARCEAVAYCSLSHQIAHWSRHKHECDRLQQQVKSVEVLNNFPFTFSRESTFQVCVKQETRCSFFSKRGLH

SEQ ID NO: 33504 - protein, 1043 aa, Glycine max
  Clone ID: TF_GmC5843_1.pep
MSSKERSQQPHSRVPRRQEWIRRDVGGCSNPRKPKKGSSSNSREESNLPQLLQEIQDKLVKGAVECMICYDMVRRSAPIWSCSGCFSIFHLTCIKKWARAPISVDLSVEKNQGGFNWRCPGCQSVQLTSSKDIRYLCFCGKRPDPPSDLYLMPHSCGEPCGKPLERDLQGDKELLCPHLCVLQCHPGPCPPCKAFAPPRLCPCGKKNITTRCSDRQSVLTCGQRCQKLLQCGRHRCQQICHLGPCHPCQVPINASCFCAQKMEVILCGEMAVKGEIRADGGVFSCGSTCQKKLNCGNHICIETCHPGSCGDCELLPSRIKTCCCGKTRLEEKRHSCLDPIPTCSQVCGKYLPCGIHHCEEPCHAGDCSPCLVLVSQKCRCGSTSRTVECCKTKMENEKFTCERPCGQKKNCGRHRCSERCCPLSNPNNILNADWDPHFCQLPCGKKLRCGQHACESLCHSGHCPPCLETIFTDLTCACGKTSIPPPLPCGTPPPSCQLPCSVPQPCWHPASHSCHFGDCPPCSMPIAKECIGGHVVLRNIPCGSKDIKCNKLCGKTRQCGLHACGRTCHLPPCDNLSAVPGIRASCGQTCGAPRRDCRHTCTAPCHPSTPCPDTRCKFPVTITCSCGRITENVPCDAGGSCANYDADTVHEASIIQKLPVLLQPVAANGKKVPLGQRKLMCNDDCAKLERKRVLADAFEITAPNLDSLHFGENSVASELLADMLRRDSKWVLSVEERCKFLVLGKSRGNAHGPKVHVFCPMLKDKRDAVRVIAERWKLAVNAAGREPKHFVVVHVTPKSRAPARVLGFKGTTTVNVPLPPAFDPLVDMDPRLVVSFIDLPMDADISALVLRFGGECELVWLNDKNALAVFNDPARAATAMRRLDHGTVYQGAVVVVVPNVGASVASSATNAWGGSGTMKGGALAALKSNPWKKDVIQEPGWREDAWGDEEWATGSANVKLPIQKKEARISASVNPWSVLNQESSSSSSVAAIKIDGSRKHSESSVITKLEPRDGGSNLGGQPAGNFDALEASDVVDDWEKACE

SEQ ID NO: 33505 - protein, 682 aa, Glycine max
  unsure (1)..(682): unsure at all Xaa locations
  Clone ID: TF_GmC701_1.pep
HASVHLFCIQSWARQASDLAAARAATRLPISPATASASALWNCPKCRSEYPKSHIPKTYFCFCGKIENPPNDPWILPHSCGEVCGRPLKHSCGHHCLLLCHPGPCPSCPKLVKVRCFCGCLEDVRRCGFKEFSCNKPCSKFLDCGVHRCIELCHPGACPPCRTRGVHACQCAKVKEERECCDRVFQCGNPCEKRLGCGKHVCERGCHSGKCGECPLKGKRTCPCGKRVYEGMPCDAPVQLCGATCDKMLPCGYHRCPERCHRGQCVETCRVVVKKSCRCGSLKKDVPCYQDLACERKYAAGSFDVRTINALLHAIXRALCSLPNNGDNFMCMWRDTCHGAKPPPNPEFTLKPKKKKIIQQSESVPGTPCPPCPELVWRSCVGKHIGAERMMVCSDKSQFSCENLCGNPLPCGNHYCTKTCHALENQLQGSQPCEDCYLSCQKRXPACPHHCPRRCHPGDCPPCKVLIKRSCHCGAMVHVFECLYYNGLSAKGQETVRSCGGPCHRKLPNCTHLCPETCHSGQCTNAEKCCKKVTVRCKCHTLKKEWVCQDVQAAYHLAGCHPRDIPKNQFGIGLIPCNSDCNSKVQVVESELQLRKTRVTEVQEPDVEKSVRKRRKRREQVLESKETSKLQKIISRMKRLLLFVFILVILLAATYYGYKGLLWLNDWMNEVDERRQRYSRIK

SEQ ID NO: 33506 - protein, 212 aa, Glycine max
  Clone ID: TF_GmC701_2.pep
MSLWQPQERYLACERKCQRMRDCGRHACKRRCCDGDCPPCSEICGRKLRCKNHKCPSPCHRGPCAPCPIMVTISCACGETRFEVPCGTEMDNKPPRCPKPCPITPLCRHASNIKPHKCHYGACHPCRLPCAKEYQCGHTCKLRCHGAKPPPNPEFTLKPKKKKIIQQSESIPGTPCPPCPELVWRSCVGKHIGAERMMVCSDNHSSPVKFMW

SEQ ID NO: 33507 - protein, 86 aa, Glycine max
  Clone ID: TF_LIB3242-265-Q1-J1-F11.pep
MESDEPADPKQPVTPRACLQCRKVKMKCLKATQGTKCARCSRKSLQCDFLEHRRGRKKGFKLNRTASKAGLSTQIYPSSGLQMLAM

SEQ ID NO: 33508 - protein, 156 aa, Glycine max
  Clone ID: TF_jC-gmst024100g08a1.pep
HMRDNILIQLCSCHRCHSQKTKCSGKRPCDGCLSSGRAEECQFPAKERKIRVDERSAERRTSVIKVDKPPVISINSKKRTGVCEPSLPGARHWETSESPQIAKIKTNLRRCPKRRVTCLILSLTDTRRTQSTNGLWSLDSLEKHNALLSATDSYHA

SEQ ID NO: 33509 - protein, 148 aa, Glycine max
  Clone ID: TF_jC-gmst024100c06a1.pep
MAKRKSTPRTRSGCRTCKVRRVKCDDQRPSCRRCLDTGRACDGYGIWGQPKSTRLLPSPVYPLRTLPGLAEEERRCLDRFRVLLTDKLTRPFGSHFWSSLVLQLSVSEPAVLHASIALTSAYDSFALAQIRENVAMVAPAPFVLGRTT

SEQ ID NO: 33510 - protein, 123 aa, Glycine max
  unsure (1)..(123): unsure at all Xaa locations
  Clone ID: TF_LIB3139-105-P1-N1-G5.pep
LVLIFQSMVGVPGKSKACINCRKRRSQCDMKRPSCGQCQRSGITCSGYQKEFIFLNSTTQEAXDGSLSLEKESYSAGTRTRNPTTAGSAASRAAATRTTXVVLHATLERSAYENNVIDEFGHH

SEQ ID NO: 33511 - protein, 96 aa, Glycine max
  Clone ID: TF_jC-gmst024100a04a1.pep
MSNSSFLDRPLLKVSRPVAACSRCRTAKIRCDGKLPACSACERAGKADTCSSSDEFPRGKERSYVGSLEAYCERLEKRAAELRERKKILTGGEEGV

SEQ ID NO: 33512 - protein, 178 aa, Glycine max
  Clone ID: TF_GmC991_1.pep
MVTRYARFCGTPPDSLNLRRYDALLVCVTNAKGANIRKFDVTVYIKVLRAVDLPGQPVSELMEVRGDSDTSMVSFSEFLVMFDDPDWGFGIMPTLVKLETGDRNRHGDVVCSVCRYPIIGSRFKEIKSHFSLCNQCYSEGKVPSSFKQEEYRFKEYGSEGEAMKDKCMCFNLQSRNEK

SEQ ID NO: 33513 - protein, 117 aa, Glycine max
  Clone ID: TF_LIB3030-004-Q1-B1-E8.pep
MKYNEISHFSHTEHKLRFEYSEFPFKCDGCKEVGIGSRYKCSICDFDLHMHCAMITSPTLHHPFYTKCNFQFMSKPPGDTPRYCNACEKDVSGFLYHCKACGFDLQPCCAKLPLLLD

SEQ ID NO: 33514 - protein, 473 aa, Glycine max
  unsure (1)..(473): unsure at all Xaa locations
  Clone ID: TF_GmC14821_1.pep
HSTQTTSLTSGAFIECPFAGTYINSWTPLPGNSQMPPFKRSHSHTDAMSGMFHKGVRCDGCGVYPITGPRFKSKVKENYDLCNICFNEMGNGTDYIRMDRPASARAPRYLHGHTKNFPTLPPHIFKKGAILKHAKPKLDSRFILDVNVIDGTMMAPSTAFTKIWRMRNNGTIVWHKGTQLVWIGGDKFSDSHSVDLEVPEDGVPLEKELDIAVDFTAPPLPGRYISYWRMTTPSGHKFGQRVWVLIQVDASLQDSFYDTSQGLNLNIPLDISGSKGPQIIDINVQPTEEDTVLQTRNPNAPIEPVNQMVDNEPRFELENEFPINEATFVGPAASAPAATPVASSSVSYPIIDLSETTPAVPSNQQSSTVDVPSSSMGTGGINSVEESLLKELEEMGFKQVDLNKEILRNNEYDLYQSLDFLCGVSEWXGTIHLLAELREMGSRDXMNKRLLEKNNGSLKRVVMDLINGEQYFS

SEQ ID NO: 33515 - protein, 156 aa, Glycine max
  Clone ID: TF_GmC90028_1.pep
RYFSLLFFFGSEFDIHVFTHFLPSLAISSRLLQVPFPKQTMLATDDAVESVVSVPGPADPSTGNNQIMIEDDTITSSVQYCCDGCSTVPIQRRRWHCTVCPDFDLCEACYEVPDADRLPPPHSRDHPMTAIPIEVDSVGDGNEFQFTADDVSDQNL

SEQ ID NO: 33516 - protein, 222 aa, Glycine max
  Clone ID: TF_GmC4344_2.pep
TFFDTRQAFLSLCQGNHYQYDTLRRAKHSSMMVLYHLHNPTAPAFVTTCNICYLDIETGQGWRCEVCPEYDVCNACYQKDGGIDHPHKLTNHPSMVDRDAQNTEAREVRVVQLRKMLDLLVHASQCRSAHCQYPNCRKVKGLFRHGMHCKTRASGGCVLCKKMWYLLQQHARACKESECHVPRCRDLKEHLRRLQQQSDSRRRAAVMEMMRQRAAEVANNAG
